(19) United States
(12) Patent Application Publication
(10) Pub. No.: US 2025/0092374 A1
(43) Pub. Date: Mar. 20, 2025

(54) EVOLVED CAS9 PROTEINS FOR GENE EDITING

(71) Applicant: President and Fellows of Harvard College, Cambridge, MA (US)

(72) Inventors: David R. Liu, Cambridge, MA (US); Johnny Hao Hu, Cambridge, MA (US)

(73) Assignee: President and Fellows of Harvard College, Cambridge, MA (US)

(21) Appl. No.: 18/732,559

(22) Filed: Jun. 3, 2024

Related U.S. Application Data
(63) Continuation of application No. 15/770,076, filed on Apr. 20, 2018, now Pat. No. 12,043,852.
(60) Provisional application No. 62/408,686, filed on Oct. 14, 2016.
(60) Provisional application No. 62/398,490, filed on Sep. 22, 2016.
(60) Provisional application No. 62/370,700, filed on Aug. 3, 2016.
(60) Provisional application No. 62/357,352, filed on Jun. 30, 2016.
(60) Provisional application No. 62/357,332, filed on Jun. 30, 2016.
(60) Provisional application No. 62/322,178, filed on Apr. 13, 2016.
(60) Provisional application No. 62/311,763, filed on Mar. 22, 2016.
(60) Provisional application No. 62/279,346, filed on Jan. 15, 2016.
(60) Provisional application No. 62/245,828, filed on Oct. 23, 2015.

(51) Int. Cl. C12N 9/22; C07K 14/32; C12N 9/24; C12N 9/78; C12N 15/11; C12N 15/90

(52) U.S. Cl. CPC C12N 9/22; C07K 14/32; C12N 9/2497; C12N 9/78; C12N 15/11; C12N 15/907; C12Y 305/04005; C07K 2319/00; C07K 2319/09; C07K 2319/80; C12N 2310/20; C12N 2800/80

(57) ABSTRACT

Some aspects of this disclosure provide strategies, systems, reagents, methods, and kits that are useful for engineering Cas9 and Cas9 variants that have increased activity on target sequences that do not contain the canonical PAM sequence. In some embodiments, fusion proteins comprising such Cas9 variants and nucleic acid editing domains, e.g., deaminase domains, are provided.

### RELATED APPLICATIONS

[0001] This application is a national stage filing under 35 U.S.C. § 371 of international PCT application, PCT/US2016/058345, filed Oct. 22, 2016, which claims priority under 35 U.S.C. § 119 (c) to U.S. provisional patent applications, U.S. Ser. No. 62/245,828 filed Oct. 23, 2015, U.S. Ser. No. 62/279,346 filed Jan. 15, 2016, U.S. Ser. No. 62/311,763 filed Mar. 22, 2016, U.S. Ser. No. 62/322,178 filed Apr. 13, 2016, U.S. Ser. No. 62/357,352 filed Jun. 30, 2016, U.S. Ser. No. 62/370,700 filed Aug. 3, 2016, U.S. Ser. No. 62/398,490 filed Sep. 22, 2016, U.S. Ser. No. 62/408,686 filed Oct. 14, 2016, and U.S. Ser. No. 62/357,332 filed Jun. 30, 2016; each of which is incorporated herein by reference.

### REFERENCE TO A SEQUENCE LISTING SUBMITTED AS A TEXT FILE VIA EFS-WEB

[0002] The present application contains a Sequence Listing which has been submitted in ASCII format via EFS-Web and is hereby incorporated by reference in its entirety. Said ASCII copy, created on Jun. 28, 2022, is named H082470224US02-SUBSEQ-EPG and is 3,977,840 bytes in size.

### BACKGROUND OF THE INVENTION

[0003] Targeted editing of nucleic acid sequences, for example, the targeted cleavage or the targeted introduction of a specific modification into genomic DNA, is a highly promising approach for the study of gene function and also has the potential to provide new therapies for human genetic diseases.¹ An ideal nucleic acid editing technology possesses three characteristics: (1) high efficiency of installing the desired modification; (2) minimal off-target activity; and (3) the ability to be programmed to edit precisely any site in a given nucleic acid, e.g., any site within the human genome.² Current genome engineering tools, including engineered zinc finger nucleases (ZFNs),³ transcription activator like effector nucleases (TALENs),⁴ and most recently, the RNA-guided DNA endonuclease Cas9,5 effect sequence-specific DNA cleavage in a genome. This programmable cleavage can result in mutation of the DNA at the cleavage site via non-homologous end joining (NHEJ) or replacement of the DNA surrounding the cleavage site via homology-directed repair (HDR).^{6,7}

[0004] One drawback of the current technologies is that both NHEJ and HDR are stochastic processes that typically result in modest gene editing efficiencies as well as unwanted gene alterations that can compete with the desired alteration.⁸ Since many genetic diseases in principle can be treated by effecting a specific nucleotide change at a specific location in the genome (for example, a C to T change in a specific codon of a gene associated with a disease),⁹ the development of a programmable way to achieve such precise gene editing would represent both a powerful new research tool, as well as a potential new approach to gene editing-based human therapeutics.

[0005] Another drawback of current genome engineering tools is that they are limited with respect to the DNA sequences that can be targeted. When using ZNFs or TALENS, a new protein must be generated for each individual target sequence. While Cas9 can be targeted to virtually any target sequence by providing a suitable guide RNA, Cas9 technology is still limited with respect to the sequences that can be targeted by a strict requirement for a protospacer-adjacent motif (PAM), typically of the nucleotide sequence 5′-NGG-3′, that must be present immediately adjacent to the 3′-end of the targeted DNA sequence in order for the Cas9 protein to bind and act upon the target sequence. The PAM requirement thus limits the sequences that can be efficiently targeted by Cas9 proteins.

### SUMMARY OF THE INVENTION

[0006] Significantly, 80-90% of protein mutations responsible for human disease arise from the substitution, deletion, or insertion of only a single nucleotide.⁶ Most current strategies for single-base gene correction include engineered nucleases (which rely on the creation of double-strand breaks, DSBs, followed by stochastic, inefficient homology-directed repair, HDR), and DNA-RNA chimeric oligonucleotides.²² The latter strategy involves the design of a RNA/DNA sequence to base pair with a specific sequence in genomic DNA except at the nucleotide to be edited. The resulting mismatch is recognized by the cell's endogenous repair system and fixed, leading to a change in the sequence of either the chimera or the genome. Both of these strategies suffer from low gene editing efficiencies and unwanted gene alterations, as they are subject to both the stochasticity of HDR and the competition between HDR and non-homologous end-joining, NHEJ.²³⁻²⁵ HDR efficiencies vary according to the location of the target gene within the genome,²⁶ the state of the cell cycle,²⁷ and the type of cell/tissue.²⁸ The development of a direct, programmable way to install a specific type of base modification at a precise location in genomic DNA with enzyme-like efficiency and no stochasticity therefore represents a powerful new approach to gene editing-based research tools and human therapeutics.

[0007] The clustered regularly interspaced short palindromic repeat (CRISPR) system is a recently discovered prokaryotic adaptive immune system¹⁰ that has been modified to enable robust and general genome engineering in a variety of organisms and cell lines.¹¹ CRISPR-Cas (CRISPR-associated) systems are protein-RNA complexes that use an RNA molecule (sgRNA) as a guide to localize the complex to a target DNA sequence via base-pairing.¹² In the natural systems, a Cas protein then acts as an endonuclease to cleave the targeted DNA sequence.¹³ The target DNA sequence must be both complementary to the sgRNA and also contain a “protospacer-adjacent motif” (PAM) at the 3′-end of the complementary region in order for the system to function.¹⁴ The requirement for a PAM sequence limits the use of Cas9 technology, since not all desired targeted sequences include a PAM sequence at the 3′-end and thus cannot efficiently be targeted by wild-type Cas9 proteins.

[0008] Provided herein are novel Cas9 variants that exhibit activity on target sequences that do not include the canonical PAM sequence (5′-NGG-3′, where N is any nucleotide) at the 3′-end. Such Cas9 variants are not restricted to target sequences that include the canonical PAM sequence at the 3′-end.

[0009] Among the known Cas proteins, Streptococcus pyogenes Cas9 has been mostly widely used as a tool for genome engineering.¹⁵ This Cas9 protein is a large, multi-domain protein containing two distinct nuclease domains. Point mutations can be introduced into Cas9 to abolish nuclease activity, resulting in a dead Cas9 (dCas9) that still retains its ability to bind DNA in a sgRNA-programmed manner.¹⁶ In principle, such Cas9 variants, when fused to another protein or domain, can target that protein to virtually any DNA sequence simply by co-expression with an appropriate sgRNA. Thus, this disclosure also contemplates fusion proteins comprising such Cas9 variants and a DNA modifying domain (e.g., a deaminase, a nuclease, a nickase, a recombinase, a methyltransferase, a methylase, an acetylase, an acetyltransferase, a transcriptional activator, or a transcriptional repressor domain), as well as the use of such fusion proteins in correcting mutations in a genome (e.g., the genome of a human subject) that are associated with disease, or generating mutations in a genome (e.g., the human genome) to decrease or prevent expression of a gene.

[0010] In some embodiments, any of the Cas9 proteins provided herein may be fused to a protein that has an enzymatic activity. In some embodiments, the enzymatic activity modifies a target DNA. In some embodiments, the enzymatic activity is nuclease activity, methyltransferase activity, demethylase activity, DNA repair activity, DNA damage activity, deamination activity, dismutase activity, alkylation activity, depurination activity, oxidation activity, pyrimidine dimer forming activity, integrase activity, transposase activity, recombinase activity, polymerase activity, ligase activity, helicase activity, photolyase activity or glycosylase activity. In some cases, the enzymatic activity is nuclease activity. In some cases, the nuclease activity introduces a double strand break in the target DNA. In some cases, the enzymatic activity modifies a target polypeptide associated with the target DNA. In some cases, the enzymatic activity is methyltransferase activity, demethylase activity, acetyltransferase activity, deacetylase activity, kinase activity, phosphatase activity, ubiquitin ligase activity, deubiquitinating activity, adenylation activity, deadenylation activity, SUMOylating activity, deSUMOylating activity, ribosylation activity, deribosylation activity, myristoylation activity or demyristoylation activity. In some cases, the target polypeptide is a histone and the enzymatic activity is methyltransferase activity, demethylase activity, acetyltransferase activity, deacetylase activity, kinase activity, phosphatase activity, ubiquitin ligase activity or deubiquitinating activity.

[0011] In some embodiments, any of the Cas9 proteins provided herein may be fused to a protein that has an enzymatic activity. In some embodiments, the enzymatic activity modifies a polypeptide associated with DNA (e.g. a histone). In some embodiments, the enzymatic activity is methyltransferase activity, demethylase activity, acetyltransferase activity, deacetylase activity, kinase activity, phosphatase activity, ubiquitin ligase activity (i.e., ubiquitination activity), deubiquitinating activity, adenylation activity, deadenylation activity, SUMOylating activity, deSUMOylating activity, ribosylation activity, deribosylation activity, myristoylation activity, demyristoylation activity glycosylation activity (e.g., from O-GlcNAc transferase) or deglycosylation activity. The enzymatic activities listed herein catalyze covalent modifications to proteins. Such modifications are known in the art to alter the stability or activity of the target protein (e.g., phosphorylation due to kinase activity can stimulate or silence protein activity depending on the target protein). Of particular interest as protein targets are histones. Histone proteins are known in the art to bind DNA and form complexes known as nucleosomes. Histones can be modified (e.g., by methylation, acetylation, ubuitination, phosphorylation) to elicit structural changes in the surrounding DNA, thus controlling the accessibility of potentially large portions of DNA to interacting factors such as transcription factors, polymerases and the like. A single histone can be modified in many different ways and in many different combinations (e.g., trimethylation of lysine 27 of histone 3, H3K27, is associated with DNA regions of repressed transcription while trimethylation of lysine 4 of histone 3, H3K4, is associated with DNA regions of active transcription). Thus, a site-directed modifying polypeptide with histone-modifying activity finds use in the site specific control of DNA structure and can be used to alter the histone modification pattern in a selected region of target DNA. Such methods find use in both research and clinical applications.

[0012] In some embodiments, the deaminase domain catalyzes the removal of an amine group from a molecule. In further embodiments, cytidine deaminase domains deaminate cytosine to yield uracil. In other embodiments, the nuclease domain has enzymatic activity and may cleave phosphodiester bonds between the nucleotide subunits of nucleic acids. In some embodiments, recombinase domains, which recombine specific sequences of DNA, may be used to manipulate the structure of genomes and to control gene expression. In further embodiments, methylase domains may be utilized to methylate their respective substrates, while acetylase domains may be used to acetylate their respective substrates. In other embodiments, acetyltransferase domains may be used to transfer an acetyl group. Examples of acetyltransferase molecules include, but are not limited to, histone acetyltransferases (e.g., CBP histone acetyltransferase), choline acetyltransferase, chloramphenicol acetytransferase, serotonic N-acetyltransferase, NatA acetyltransferase, and NatB acetyltransferase. The disclosure also contemplates transcriptional activator and transcriptional repressor domains. Transcriptional activator domains are regions of a transcription factor which may activate transcription from a promoter through an interaction or multiple interactions with a DNA binding domain, general transcription factors, and RNA polymerase. Transcriptional repressor domains are regions of a transcription factor which may repress transcription from a protomer through an interaction or multiple interactions with a DNA binding domain, general transcription factors, and RNA polymerase.

[0013] The potential of the Cas9 system for genome engineering is immense. Its unique ability to bring proteins to specific sites in a genome programmed by the sgRNA can be developed into a variety of site-specific genome engineering tools beyond nucleases, including transcriptional activators, transcriptional repressors, histone-modifying proteins, integrases, deaminases, and recombinases.¹¹ Some of these potential applications have recently been implemented through dCas9 fusions with transcriptional activators to afford RNA-guided transcriptional activators,^{17,18} transcriptional repressors,^{16,19,20} and chromatin modification enzymes.²¹ Simple co-expression of these fusions with a variety of sgRNAs results in specific expression of the target genes. These seminal studies have paved the way for the design and construction of readily programmable sequence-specific effectors for the precise manipulation of genomes.

[0014] Some aspects of this disclosure provide strategies, systems, proteins, nucleic acids, compositions, cells, reagents, methods, and kits that are useful for the targeted binding, editing, and/or cleaving of nucleic acids, including editing a single site within a subject's genome, e.g., a human subject's genome. In some embodiments, recombinant Cas9 proteins are provided that comprise at least one, at least two, at least three, at least four, at least five, at least six, at least seven, at least eight, at least nine, or at least ten mutations as compared to a naturally occurring Cas9 protein, and that exhibit activity on target sequences that do not include the canonical PAM (5′-NGG-3′, where N is any nucleotide) at the 3′-end. Examples of such Cas9 protein mutations are given in Tables 3, 5, 8, and 9. In some embodiments, fusion proteins of Cas9 and nucleic acid editing enzymes or enzymatic domains, e.g., deaminase domains, are provided. In some embodiments, methods for targeted nucleic acid binding, editing, and/or cleaving are provided. In some embodiments, reagents and kits for the generation of targeted nucleic acid binding, editing, and/or cleaving proteins, e.g., fusion proteins of Cas9 variants and nucleic acid editing enzymes or domains, are provided.

[0015] Some aspects of this disclosure provide recombinant Cas9 proteins comprising an amino acid sequence that is at least 80%, at least 85%, at least 90%, at least 92%, at least 95%, at least 96%, at least 97%, at least 98%, at least 99%, or at least 99.5% identical to the amino acid sequence of Cas9 as provided by any of the sequences set forth in SEQ ID NOs: 9-262, wherein the amino acid sequence of the Cas9 protein comprises at least one, at least two, at least three, at least four, at least five, at least six, or at least seven mutations in an amino acid residue selected from the group consisting of amino acid residues 122, 137, 182, 262, 294, 409, 480, 543, 660, 694, 1219, and 1329 of S. pyogenes Cas9 having the amino acid sequence provided in SEQ ID NO: 9, or in a corresponding amino acid residue in any of the amino acid sequences provided in SEQ ID NOs: 10-262. In some embodiments, the recombinant Cas9 protein comprises a RuvC and an HNH domain. In some embodiments, the amino acid sequence of the recombinant Cas9 protein is not identical to the amino acid sequence of a naturally occurring Cas9 protein. In some embodiments, the amino acid sequence of the Cas9 protein comprises at least one, at least two, at least three, at least four, at least five, at least six, or at least seven mutations selected from the group consisting of X262T, X294R, X409I, X480K, X543D, X694I, and X1219V of the amino acid sequence provided in SEQ ID NO: 9, or a corresponding mutation in any of the amino acid sequences provided in SEQ ID NOs: 10-262, wherein X represents any amino acid. In some embodiments, the amino acid sequence of the Cas9 protein comprises at least one, at least two, at least three, at least four, at least five, at least six, or at least seven mutations selected from the group consisting of A262T, K294R, S409I, E480K, E543D, M694I, and E1219V of the amino acid sequence provided in SEQ ID NO: 9, or a corresponding mutation in any of the amino acid sequences provided in SEQ ID NOs: 10-262.

[0016] Other aspects of this disclosure provide recombinant Cas9 proteins comprising an amino acid sequence that is at least 80%, at least 85%, at least 90%, at least 92%, at least 95%, at least 96%, at least 97%, at least 98%, at least 99%, or at least 99.5% identical to the amino acid sequence of Cas9 as provided by any of the sequences set forth in SEQ ID NOs: 10-262, wherein the amino acid sequence of the Cas9 protein comprises at least one, at least two, at least three, at least four, at least five, at least six, or at least seven mutations in an amino acid residue selected from the group consisting of amino acid residues 262, 267, 294, 405, 409, 480, 543, 694, 1219, 1224, 1256, and 1362 of the amino acid sequence provided in SEQ ID NO: 9, or in a corresponding amino acid residue in any of the amino acid sequences provided in SEQ ID NOS: 10-262; and wherein the amino acid sequence of the recombinant Cas9 protein is not identical to the amino acid sequence of a naturally occurring Cas9 protein. In some embodiments, the Cas9 protein comprises a RuvC and an HNH domain. In some embodiments, the amino acid sequence of the Cas9 protein comprises at least one, at least two, at least three, at least four, at least five, at least six, or at least seven mutations selected from the group consisting of X262T, X267G, X294R, X405I, X409I, X480K, X543D, X694I, X1219V, X1224K, and X1256K of the amino acid sequence provided in SEQ ID NO: 9, or a corresponding mutation in any of the amino acid sequences provided in SEQ ID NOs: 10-262, wherein X represents any amino acid. In some embodiments, the amino acid sequence of the Cas9 protein comprises at least one, at least two, at least three, at least four, at least five, at least six, or at least seven mutations selected from the group consisting of A262T, S267G, K294R, F405I, S409I, E480K, E543D, M694I, E1219V, N1224K, and Q1256K of the amino acid sequence provided in SEQ ID NO: 9, or a corresponding mutation in any of the amino acid sequences provided in in SEQ ID NOs: 10-262.

[0017] It should be appreciated that any of the amino acid mutations described herein, (e.g., A262T) from a first amino acid residue (e.g., A) to a second amino acid residue (e.g., T) may also include mutations from the first amino acid residue to an amino acid residue that is similar to (e.g., conserved) the second amino acid residue. For example, a mutation of an alanine to a threonine (e.g., a A262T mutation) may also be a mutation from an alanine to an amino acid that is similar in size and chemical properties to a threonine, for example, serine. Additional similar amino acid pairs include, but are not limited to, the following: phenylalanine and tyrosine; asparagine and glutamine; methionine and cysteine; aspartic acid and glutamic acid; and arginine and lysine. The skilled artisan would recognize that such conservative amino acid substitutions will likely have minor effects on protein structure and are likely to be well tolerated without compromising function. In some embodiments, any of the amino acid mutations provided herein from one amino acid to a threonine may be an amino acid mutation to a serine. In some embodiments, any of the amino acid mutations provided herein from one amino acid to an arginine may be an amino acid mutation to a lysine. In some embodiments, any of the amino acid mutations provided herein from one amino acid to an isoleucine may be an amino acid mutation to an alanine, valine, methionine, or leucine. In some embodiments, any of the amino acid mutations provided herein from one amino acid to a lysine may be an amino acid mutation to an arginine. In some embodiments, any of the amino acid mutations provided herein from one amino acid to an aspartic acid may be an amino acid mutation to a glutamic acid or asparagine. In some embodiments, any of the amino acid mutations provided herein from one amino acid to a valine may be an amino acid mutation to an alanine, isoleucine, methionine, or leucine. In some embodiments, any of the amino acid mutations provided herein from one amino acid to a glycine may be an amino acid mutation to an alanine. It should be appreciated, however, that additional conserved amino acid residues would be recognized by the skilled artisan and any of the amino acid mutations to other conserved amino acid residues are also within the scope of this disclosure.

[0018] In some embodiments, the Cas9 protein is a Cas9 domain of a fusion protein. In some embodiments, the amino acid sequence of the Cas9 protein comprises an X1219V mutation of the amino acid sequence provided in SEQ ID NO: 9, or a corresponding mutation in any of the amino acid sequences provided in SEQ ID NOs: 10-262, wherein X represents any amino acid. In some embodiments, the mutation is X1219A, X1219I, X1219M, or X1219L.

[0019] In some embodiments, the amino acid sequence of the Cas9 protein comprises an E1219V mutation of the amino acid sequence provided in SEQ ID NO: 9, or a corresponding mutation in any of the amino acid sequences provided in SEQ ID NOs: 10-262. In some embodiments, the mutation is E1219A, E1219I, E1219M or E1219L.

[0020] In some embodiments, the amino acid sequence of the Cas9 protein comprises an X480K mutation of the amino acid sequence provided in SEQ ID NO: 9, or a corresponding mutation in any of the amino acid sequences provided in SEQ ID NOs: 10-262, wherein X represents any amino acid. In some embodiments, the mutation is X480R.

[0021] In some embodiments, the amino acid sequence of the Cas9 protein comprises an E480K mutation of the amino acid sequence provided in SEQ ID NO: 9, or a corresponding mutation in any of the amino acid sequences provided in SEQ ID NOs: 10-262. In some embodiments, the mutation is E480R.

[0022] In some embodiments, the amino acid sequence of the Cas9 protein comprises an X543D mutation of the amino acid sequence provided in SEQ ID NO: 9, or a corresponding mutation in any of the amino acid sequences provided in SEQ ID NOs: 10-262, wherein X represents any amino acid. In some embodiments, the mutation is X543N.

[0023] In some embodiments, the amino acid sequence of the Cas9 protein comprises an E543D mutation of the amino acid sequence provided in SEQ ID NO: 9, or a corresponding mutation in any of the amino acid sequences provided in SEQ ID NOs: 10-262. In some embodiments, the mutation is E543N.

[0024] In some embodiments, the amino acid sequence of the Cas9 protein comprises the mutations X480K, X543D, and X1219V of the amino acid sequence provided in SEQ ID NO: 9, or a corresponding mutation in any of the amino acid sequences provided in SEQ ID NOs: 10-262, wherein X represents any amino acid.

[0025] In some embodiments, the amino acid sequence of the Cas9 protein comprises the mutations X262T, X409I, X480K, X543D, X694I, and X1219V of the amino acid sequence provided in SEQ ID NO: 9, or a corresponding mutation in any of the amino acid sequences provided in SEQ ID NOs: 10-262, wherein X represents any amino acid.

[0026] In some embodiments, the amino acid sequence of the Cas9 protein comprises the mutations X294R, X480K, X543D, X1219V, X1256K, and X1362P of the amino acid sequence provided in SEQ ID NO: 9, or a corresponding mutation in any of the amino acid sequences provided in SEQ ID NOs: 10-262, wherein X represents any amino acid.

[0027] In some embodiments, the amino acid sequence of the Cas9 protein comprises the mutations X294R, X480K, X543D, X1219V, and X1256K of the amino acid sequence provided in SEQ ID NO: 9, or a corresponding mutation in any of the amino acid sequences provided in SEQ ID NOs: 10-262, wherein X represents any amino acid.

[0028] In some embodiments, the amino acid sequence of the Cas9 protein comprises the mutations X267G, X294R, X480K, X543D, X1219V, X1224K, and X1256K of the amino acid sequence provided in SEQ ID NO: 9, or a corresponding mutation in any of the amino acid sequences provided in SEQ ID NOs: 10-262, wherein X represents any amino acid.

[0029] In some embodiments, the amino acid sequence of the Cas9 protein comprises the mutations X262T, X405I, X409I, X480K, X543D, X694I, and X1219V of the amino acid sequence provided in SEQ ID NO: 9, or a corresponding mutation in any of the amino acid sequences provided in SEQ ID NOs: 10-262, wherein X represents any amino acid.

[0030] In some embodiments, the amino acid sequence of the Cas9 protein comprises the mutations E480K, E543D, and E1219V of the amino acid sequence provided in SEQ ID NO: 9, or a corresponding mutation in any of the amino acid sequences provided in SEQ ID NOs: 10-262.

[0031] In some embodiments, the amino acid sequence of the Cas9 protein comprises the mutations A262T, S409I, E480K, E543D, M694I, and E1219V of the amino acid sequence provided in SEQ ID NO: 9, or a corresponding mutation in any of the amino acid sequences provided in SEQ ID NOs: 10-262.

[0032] In some embodiments, the amino acid sequence of the Cas9 protein comprises the mutations K294R, E480K, E543D, E1219V, Q1256K, and L1362P of the amino acid sequence provided in SEQ ID NO: 9, or a corresponding mutation in any of the amino acid sequences provided in SEQ ID NOs: 10-262.

[0033] In some embodiments, the amino acid sequence of the Cas9 protein comprises the mutations K294R, E480K, E543D, E1219V, and Q1256K of the amino acid sequence provided in SEQ ID NO: 9, or a corresponding mutation in any of the amino acid sequences provided in SEQ ID NOs: 10-262.

[0034] In some embodiments, the amino acid sequence of the Cas9 protein comprises the mutations S267G, K294R, E480K, E543D, E1219V, N1224K, and Q1256K of the amino acid sequence provided in SEQ ID NO: 9, or a corresponding mutation in any of the amino acid sequences provided in SEQ ID NOs: 10-262.

[0035] In some embodiments, the amino acid sequence of the Cas9 protein comprises the mutations A262T, F405I, S409I, E480K, E543D, M694I, and E1219V of the amino acid sequence provided in SEQ ID NO: 9, or a corresponding mutation in any of the amino acid sequences provided in SEQ ID NOs: 10-262.

[0036] The HNH nuclease domain of Cas9 functions to cleave the DNA strand complementary to the guide RNA (gRNA). Its active site consists of a ββα-metal fold, and its histidine 840 activates a water molecule to attack the scissile phosphate, which is more electrophilic due to coordination with a magnesium ion, resulting in cleavage of the 3′-5′ phosphate bond. In some embodiments, the amino acid sequence of the HNH domain is at least 80%, at least 85%, at least 90%, at least 92%, at least 95%, at least 96%, at least 97%, at least 98%, at least 99%, or at least 99.5% identical to the amino acid sequence of the HNH domain of any of SEQ ID NOs: 9-262. In some embodiments, the amino acid sequence of the HNH domain is identical to the amino acid sequence of the HNH domain of any of SEQ ID NOs: 9-262.

[0037] The RuvC domain of Cas9 cleaves the non-target DNA strand. It is encoded by sequentially disparate sites which interact in the tertiary structure to form the RuvC cleavage domain and consists of an RNase H fold structure. In some embodiments, the amino acid sequence of the RuvC domain is at least 80%, at least 85%, at least 90%, at least 92%, at least 95%, at least 96%, at least 97%, at least 98%, at least 99%, or at least 99.5% identical to the amino acid sequence of the RuvC domain of any of SEQ ID NOs: 9-262. In some embodiments, the amino acid sequence of the RuvC domain is identical to the amino acid sequence of the RuvC domain of any of SEQ ID NOs: 9-262.

[0038] In some embodiments, the Cas9 protein comprises one or more mutations that affects (e.g., inhibits) the ability of Cas9 to cleave one or both strands of a DNA duplex. In some embodiments, the Cas9 protein comprises a D10A and/or a H840A mutation of the amino acid sequence provided in SEQ ID NO: 9, or a corresponding mutation in any of the amino acid sequences provided in SEQ ID NOs: 10-262. In some embodiments, the Cas9 protein comprises a D10X₁ and/or a H840X₂ mutation of the amino acid sequence provided in SEQ ID NO: 9, or a corresponding mutation in any of the amino acid sequences provided in SEQ ID NOs: 10-262, wherein X1 is any amino acid except for D, and X₂ is any amino acid except for H. In some embodiments, the Cas9 protein comprises an D10A mutation of the amino acid sequence provided in SEQ ID NO: 9, or a corresponding mutation in any of the amino acid sequences provided in SEQ ID NOs: 10-262. In some embodiments, the Cas9 protein comprises an H at amino acid residue 840 of the amino acid sequence provided in SEQ ID NO: 9, or a corresponding residue in any of the amino acid sequences provided in SEQ ID NOs: 10-262. In some embodiments, the Cas9 protein comprises an H840A mutation of the amino acid sequence provided in SEQ ID NO: 9, or a corresponding mutation in any of the amino acid sequences provided in SEQ ID NOs: 10-262. In some embodiments, the Cas9 protein comprises a D at amino acid residue 10 of the amino acid sequence provided in SEQ ID NO: 9, or a corresponding residue in any of the amino acid sequences provided in SEQ ID NOs: 10-262.

[0039] In some embodiments, the Cas9 protein of the present disclosure exhibits activity, for example, increased binding, on a target sequence that does not include the canonical PAM sequence (5′-NGG-3′) at its 3′-end as compared to Streptococcus pyogenes Cas9 as provided by SEQ ID NO: 9.

[0040] Some aspects of this disclosure provide recombinant Cas9 proteins comprising an amino acid sequence that is at least 90% identical to the amino acid sequence of Streptococcus pyogenes Cas9 as provided by SEQ ID NO: 9 wherein the amino acid sequence of the Cas9 protein comprises at least one, at least two, at least three, at least four, at least five, at least six, or at least seven mutations selected from the group consisting of amino acid residues 262, 267, 294, 405, 409, 480, 543, 694, 1219, 1224, 1256, and 1362 of the amino acid sequence provided in SEQ ID NO: 9, wherein the amino acid sequence of the recombinant Cas9 protein is not identical to the amino acid sequence of a naturally occurring Cas9 protein, and wherein the recombinant Cas9 protein exhibits increased activity on a target sequence that does not comprise the canonical PAM sequence (5′-NGG-3′) at its 3′ end as compared to Streptococcus pyogenes Cas9 as provided in SEQ ID NO: 9. In some embodiments, the Streptococcus pyogenes Cas9 comprises a RuvC and an HNH domain. In other embodiments, the Cas9 protein comprises at least one, at least two, at least three, at least four, at least five, at least six, or at least seven mutations selected from the group consisting of amino acid residues 122, 137, 182, 262, 294, 409, 480, 543, 660, 694, 1219, and 1329 of the amino acid sequence provided in SEQ ID NO: 9

[0041] As one example, the Cas9 protein may exhibit increased binding to the target sequence, may exhibit increased nuclease activity at the target sequence, or may exhibit an increase in other activities, depending on whether the Cas 9 protein is fused to an additional domain, such as an enzyme that has enzymatic activity. In some embodiments, the enzymatic activity modifies a target DNA. In some embodiments, the enzymatic activity is nuclease activity, methyltransferase activity, demethylase activity, DNA repair activity, DNA damage activity, deamination activity, dismutase activity, alkylation activity, depurination activity, oxidation activity, pyrimidine dimer forming activity, integrase activity, transposase activity, recombinase activity, polymerase activity, ligase activity, helicase activity, photolyase activity or glycosylase activity. In some cases, the enzymatic activity is nuclease activity. In some cases, the nuclease activity introduces a double strand break in the target DNA. In some cases, the enzymatic activity modifies a target polypeptide associated with the target DNA. In some cases, the enzymatic activity is methyltransferase activity, demethylase activity, acetyltransferase activity, deacetylase activity, kinase activity, phosphatase activity, ubiquitin ligase activity, deubiquitinating activity, adenylation activity, deadenylation activity, SUMOylating activity, deSUMOylating activity, ribosylation activity, deribosylation activity, myristoylation activity or demyristoylation activity. In some cases, the target polypeptide is a histone and the enzymatic activity is methyltransferase activity, demethylase activity, acetyltransferase activity, deacetylase activity, kinase activity, phosphatase activity, ubiquitin ligase activity or deubiquitinating activity.

[0042] In some embodiments, any of the Cas9 protein is fused to a protein that has an enzymatic activity. In some embodiments, the enzymatic activity modifies a polypeptide associated with DNA (e.g. a histone). In some embodiments, the enzymatic activity is methyltransferase activity, demethylase activity, acetyltransferase activity, deacetylase activity, kinase activity, phosphatase activity, ubiquitin ligase activity (i.e., ubiquitination activity), deubiquitinating activity, adenylation activity, deadenylation activity, SUMOylating activity, deSUMOylating activity, ribosylation activity, deribosylation activity, myristoylation activity, demyristoylation activity glycosylation activity (e.g., from O-GlcNAc transferase) or deglycosylation activity. The enzymatic activities listed herein catalyze covalent modifications to proteins. Such modifications are known in the art to alter the stability or activity of the target protein (e.g., phosphorylation due to kinase activity can stimulate or silence protein activity depending on the target protein). Of particular interest as protein targets are histones. Histone proteins are known in the art to bind DNA and form complexes known as nucleosomes. Histones can be modified (e.g., by methylation, acetylation, ubuitination, phosphorylation) to elicit structural changes in the surrounding DNA, thus controlling the accessibility of potentially large portions of DNA to interacting factors such as transcription factors, polymerases and the like. A single histone can be modified in many different ways and in many different combinations (e.g., trimethylation of lysine 27 of histone 3, H3K27, is associated with DNA regions of repressed transcription while trimethylation of lysine 4 of histone 3, H3K4, is associated with DNA regions of active transcription). Thus, a site-directed modifying polypeptide with histone-modifying activity finds use in the site specific control of DNA structure and can be used to alter the histone modification pattern in a selected region of target DNA. Such methods find use in both research and clinical applications.

[0043] In some embodiments, the Cas9 protein exhibits activity on a target sequence having a 3′ end that is not directly adjacent to, or does not have the canonical PAM sequence (5′-NGG-3′), that is at least 2-fold, at least 3-fold, at least 5-fold, at least 10-fold, at least 50-fold, at least 100-fold, at least 500-fold, at least 1,000-fold, at least 5,000-fold, at least 10,000-fold, at least 50,000-fold, at least 100,000-fold, at least 500,000-fold, or at least 1,000,000-fold increased as compared to the activity of Streptococcus pyogenes Cas9 as provided by SEQ ID NO: 9 on the same target sequence.

[0044] In some embodiments, the 3′-end of the target sequence is directly adjacent to an AGC, GAG, TTT, GTG, CAA CAC, GAT, TAA, ACG, CGA, or CGT sequence.

[0045] In some embodiments, the Cas9 protein activity is measured by a nuclease assay or a nucleic acid binding assay, which are known in the art and would be apparent to the skilled artisan. As provided herein, the Cas9 protein may be fused to one or more domains that confer an activity to the protein, such as a nucleic acid editing activity (e.g., deaminase activity or transcriptional activation activity), which may be measured (e.g., by a deaminase assay or transcriptional activation assay). In some embodiments, the Cas9 protein is fused to a deaminase domain and its activity may be measured using a deaminase assay. In some embodiments, the Cas9 protein is fused to a transcriptional activation domain and its activity may be measured using a transcriptional activation assay, for example, reporter activation assay where the reporter, e.g., GFP or luciferase, among others, is expressed in response to Cas9 binding to a target sequence.

[0046] In some embodiments, the amino acid sequence of the Cas9 protein comprises any of the mutations provided herein. For example, in some embodiments, the amino acid sequence of the Cas9 protein comprises at least one, at least two, at least three, at least four, at least five, at least six, or at least seven mutations selected from the group consisting of X262T, X267G, X294R, X405I, X409I, X480K, X543D, X694I, X1219V, X1224K, X1256K, and X1362P of the amino acid sequence provided in SEQ ID NO: 9, or a corresponding mutation in any of the amino acid sequences provided in SEQ ID NOs: 10-262, wherein X represents any amino acid. In other embodiments, the mutations may be A262T, S267G, K294R, F405I, S409I, E480K, E543D, M694I, E1219V, N1224K, Q1256K, and L1362P of the amino acid sequence provided in SEQ ID NO: 9, or a corresponding mutation in any of the amino acid sequences provided in SEQ ID NOs: 10-262.

[0047] In some embodiments, the amino acid sequence of the Cas9 protein comprises any of the mutations provided herein. For example, in some embodiments, the amino acid sequence of the Cas9 protein comprises at least one, at least two, at least three, at least four, at least five, at least six, or at least seven mutations selected from the group consisting of X262T, X294R, X409I, X480K, X543D, X694I, and X1219V of the amino acid sequence provided in SEQ ID NO: 9, or a corresponding mutation in any of the amino acid sequences provided in SEQ ID NOs: 10-262, wherein X represents any amino acid. In other embodiments, the mutations may be A262T, K294R, S409I, E480K, E543D, M694I, or E1219V of the amino acid sequence provided in SEQ ID NO: 9, or a corresponding mutation in any of the amino acid sequences provided in SEQ ID NOs: 10-262.

[0048] In some embodiments, the amino acid sequence of the Cas9 protein comprises an X1219V mutation or an E1219V mutation of the amino acid sequence provided in SEQ ID NO: 9, or a corresponding mutation in any of the amino acid sequences provided in SEQ ID NOs: 10-262, wherein X represents any amino acid.

[0049] In some embodiments, the amino acid sequence of the Cas9 protein comprises an X480K mutation or an E480K mutation of the amino acid sequence provided in SEQ ID NO: 9, or a corresponding mutation in any of the amino acid sequences provided in SEQ ID NOs: 10-262, wherein X represents any amino acid.

[0050] In some embodiments, the amino acid sequence of the Cas9 protein comprises an X543D mutation or a E543D mutation of the amino acid sequence provided in SEQ ID NO: 9, or a corresponding mutation in any of the amino acid sequences provided in SEQ ID NOs: 10-262, wherein X represents any amino acid.

[0051] In some embodiments, the amino acid sequence of the Cas9 comprises the mutations X480K, X543D, and X1219V; or the mutations E480K, E543D, and E1219V of the amino acid sequence provided in SEQ ID NO: 9, or a corresponding mutation in any of the amino acid sequences provided in SEQ ID NOs: 10-262, wherein X represents any amino acid.

[0052] In some embodiments, the amino acid sequence of the Cas9 comprises the mutations X262T, X409I, X480K, X543D, X694I, and X1219V; or the mutations A262T, S409I, E480K, E543D, M694I, and E1219V of the amino acid sequence provided in SEQ ID NO: 9, or a corresponding mutation in any of the amino acid sequences provided in SEQ ID NOs: 10-262, wherein X represents any amino acid.

[0053] In some embodiments, the amino acid sequence of the Cas9 protein comprises the mutations X294R, X480K, X543D, X1219V, X1256K, and X1362P; or the mutations K294R, E480K, E543D, E1219V, Q1256K, and L1362P of the amino acid sequence provided in SEQ ID NO: 9, or a corresponding mutation in any of the amino acid sequences provided in SEQ ID NOs: 10-262, wherein X represents any amino acid.

[0054] In some embodiments, the amino acid sequence of the Cas9 protein comprises the mutations X294R, X480K, X543D, X1219V, and X1256K, or mutations K294R, E480K, E543D, E1219V, and Q1256K of the amino acid sequence provided in SEQ ID NO: 9, or a corresponding mutation in any of the amino acid sequences provided in SEQ ID NOs: 10-262, wherein X represents any amino acid.

[0055] In some embodiments, the amino acid sequence of the Cas9 protein comprises the mutations X267G, X294R, X480K, X543D, X1219V, X1224K, and X1256K; or the mutations S267G, K294R, E480K, E543DE1219V, N1224K, and Q1256K of the amino acid sequence provided in SEQ ID NO: 9, or a corresponding mutation in any of the amino acid sequences provided in SEQ ID NOs: 10-262, wherein X represents any amino acid.

[0056] In some embodiments, the amino acid sequence of the Cas9 protein comprises the mutations X262T, X405I, X409I, X480K, X543D, X694I, and X1219V; or the mutations A262T, F405I, S409I, E480K, E543D, M694I, and E1219V of the amino acid sequence provided in SEQ ID NO: 9, or a corresponding mutation in any of the amino acid sequences provided in SEQ ID NOs: 10-262, wherein X represents any amino acid.

[0057] In some embodiments, the amino acid sequence of the HNH domain is at least 80%, at least 85%, at least 90%, at least 92%, at least 95%, at least 96%, at least 97%, at least 98%, at least 99%, or at least 99.5% identical to the amino acid sequence of the HNH domain of any of SEQ ID NOs: 9-262. In some embodiments, the amino acid sequence of the HNH domain is identical to the amino acid sequence of any of the HNH domains of SEQ ID NOs: 9-262.

[0058] In some embodiments, the amino acid sequence of the RuvC domain is at least 80%, at least 85%, at least 90%, at least 92%, at least 95%, at least 96%, at least 97%, at least 98%, at least 99%, or at least 99.5% identical to the amino acid sequence of the RuvC domain of any of SEQ ID NOs: 9-262. In some embodiments, the amino acid sequence of the RuvC domain is identical to the amino acid sequence of any of the RuvC domains of SEQ ID NOs: 9-262.

[0059] In some embodiments, the Cas9 protein comprises at D10A and/or a H840A mutation in the amino acid sequence provided in SEQ ID NO: 9, or a corresponding mutation in any of the amino acid sequences provided in SEQ ID NOs: 10-262. In some embodiments, the Cas9 protein comprises a D10X₁ and/or a H840X₂ mutation of the amino acid sequence provided in SEQ ID NO: 9, or a corresponding mutation in any of the amino acid sequences provided in SEQ ID NOs: 10-262, wherein X₁ is any amino acid except for D, and wherein X₂ is any amino acid except for H. In some embodiments, the Cas9 protein comprises an D10A mutation of the amino acid sequence provided in SEQ ID NO: 9, or a corresponding mutation in any of the amino acid sequences provided in SEQ ID NOs: 10-262. In some embodiments, the Cas9 protein comprises an H at amino acid residue 840 of the amino acid sequence provided in SEQ ID NO: 9, or a corresponding residue in any of the amino acid sequences provided in SEQ ID NOs: 10-262. In some embodiments, the Cas9 protein comprises an H840A mutation of the amino acid sequence provided in SEQ ID NO: 9, or a corresponding mutation in any of the amino acid sequences provided in SEQ ID NOs: 10-262. In some embodiments, the Cas9 protein comprises an D at amino acid residue 10 of the amino acid sequence provided in SEQ ID NO: 9, or a corresponding residue in any of the amino acid sequences provided in SEQ ID NOS: 10-262.

[0060] Some aspects of this disclosure provide fusion proteins comprising a Cas9 protein as provided herein that is fused to a second protein, thus forming a fusion protein. In some embodiments, the second protein is fused to the N-terminus of the Cas9 protein. In some embodiments, the second protein is fused to the C-terminus of the Cas9 protein. In some embodiments, the Cas9 domain and the effector domain are fused via a linker. The linker may be as simple as a covalent bond, or it may be a polymeric linker many atoms in length. In certain embodiments, the linker is a polypeptide or based on amino acids. In other embodiments, the linker is not peptide-like. In certain embodiments, the linker is a covalent bond (e.g., a carbon-carbon bond, disulfide bond, carbon-heteroatom bond, etc.). In certain embodiments, the linker is a carbon-nitrogen bond of an amide linkage. In certain embodiments, the linker is a cyclic or acyclic, substituted or unsubstituted, branched or unbranched aliphatic or heteroaliphatic linker. In certain embodiments, the linker is polymeric (e.g., polyethylene, polyethylene glycol, polyamide, polyester, etc.). In certain embodiments, the linker comprises a monomer, dimer, or polymer of aminoalkanoic acid. In certain embodiments, the linker comprises an aminoalkanoic acid (e.g., glycine, ethanoic acid, alanine, beta-alanine, 3-aminopropanoic acid, 4-aminobutanoic acid, 5-pentanoic acid, etc.). In certain embodiments, the linker comprises a monomer, dimer, or polymer of aminohexanoic acid (Ahx). In certain embodiments, the linker is based on a carbocyclic moiety (e.g., cyclopentane, cyclohexane). In other embodiments, the linker comprises a polyethylene glycol moiety (PEG). In other embodiments, the linker comprises amino acids. In certain embodiments, the linker comprises a peptide. In certain embodiments, the linker comprises an aryl or heteroaryl moiety. In certain embodiments, the linker is based on a phenyl ring. The linker may included functionalized moieties to facilitate attachment of a nucleophile (e.g., thiol, amino) from the peptide to the linker. Any electrophile may be used as part of the linker. Exemplary electrophiles include, but are not limited to, activated esters, activated amides, Michael acceptors, alkyl halides, aryl halides, acyl halides, and isothiocyanates.

[0061] In some embodiments, the linker comprises a chemical group or molecule linking two molecules or moieties, e.g., two domains of a fusion protein, such as, for example, a nuclease-inactive Cas9 domain and a effector domain (e.g., a deaminase domain). In some embodiments, the linker comprises one or more amino acid residues. For example, the linker may comprise at least 1, 2, 3, 4, 5, 6, 7, 8, 9, 10, 11, 12, 13, 14, 15, 16, 17, 18, 19, 20, 21, 25, 30, 35, 40, 45, 50, or more amino acid residues. In some embodiments, the linker is 3, 9, 16, or 21 amino acids in length. In some embodiments, the linker comprises a (GGGGS)ₙ(SEQ ID NO: 5), a (G)ₙ (SEQ ID NO: 5087), an (EAAAK)ₙ(SEQ ID NO: 6), a (GGS)ₙ(SEQ ID NO: 5088), an SGSETPGTSESATPES (SEQ ID NO: 7) (also referred to as XTEN), or an (XP)ₙ (SEQ ID NO: 5089) motif, or a combination of any of these, wherein n is independently an integer between 1 and 30. In some embodiments, wherein the linker comprises a (GGS)₃ (SEQ ID NO: 5088) motif or a SGSETPGTSESATPES (SEQ ID NO: 7) (XTEN) motif.

[0062] Some aspects of this disclosure provide fusion proteins comprising a Cas9 protein as provided herein that is fused to a second protein, thus forming a fusion protein. In some embodiments, the second protein is fused to the N-terminus of the Cas9 protein. In some embodiments, the second protein is fused to the C-terminus of the Cas9 protein. In some embodiments, the Cas9 domain and the effector domain are fused via a nuclear localization sequence (NLS), for example a NLS comprising the amino acid sequence PKKKRKV (SEQ ID NO: 299), MDSLLMNRRKFLYQFKNVRWAKGRRETYLC (SEQ ID NO: 300), or SPKKKRKVEAS (SEQ ID NO: 284). In some embodiments, a NLS may be combined with any of the linkers listed above.

[0063] In some embodiments, the effector domain comprises an enzymatic domain. In some embodiments, the effector domain comprises a nuclease, a nickase, a recombinase, a deaminase, a methyltransferase, a methylase, an acetylase, an acetyltransferase, a transcriptional activator, or a transcriptional repressor domain, which may have nuclease activity, nickase activity, recombinase activity, deaminase activity, methyltransferase activity, methylase activity, acetylase activity, acetyltransferase activity transcriptional activation activity or transcriptional repression activity, respectively. In some embodiments, the effector domain is a effector domain. In some embodiments, the effector domain is a deaminase domain. In some embodiments, the deaminase is a cytosine deaminase or a cytidine deaminase. In some embodiments, the deaminase is an apolipoprotein B mRNA-editing complex (APOBEC) family deaminase. In some embodiments, the deaminase is an APOBEC1 deaminase. In some embodiments, the deaminase is an APOBEC2 deaminase. In some embodiments, the deaminase is an APOBEC3 deaminase. In some embodiments, the deaminase is an APOBEC3A deaminase. In some embodiments, the deaminase is an APOBEC3D deaminase. In some embodiments, the deaminase is an APOBEC3E deaminase. In some embodiments, the deaminase is an APOBEC3F deaminase. In some embodiments, the deaminase is an APOBEC3G deaminase. In some embodiments, the deaminase is an APOBEC3H deaminase. In some embodiments, the deaminase is an APOBEC4 deaminase. In some embodiments, the deaminase is an activation-induced deaminase (AID). In some embodiments, the effector domain is at least 80%, at least 85%, at least 90%, at least 92%, at least 95%, at least 96%, at least 97%, at least 98%, at least 99%, or at least 99.5% identical to the deaminase domain of any one of SEQ ID NOs: 263-281. In some embodiments, the deaminase is a cytidine deaminase. In some embodiments, the deaminase is an apolipoprotein B mRNA-editing complex (APOBEC) family deaminase. In some embodiments, the deaminase is an APOBEC1 family deaminase. In some embodiments, the deaminase is an activation-induced cytidine deaminase (AID). In some embodiments, the deaminase is an ACF1/ASE deaminase. In some embodiments, the deaminase is an adenosine deaminase. In some embodiments, the deaminase is an ADAT family deaminase.

[0064] Some aspects of this disclosure provide fusion proteins comprising a Cas9 protein fused to a effector domain, e.g., a deaminase, and a uracil glycosylase inhibitor (UGI). Some aspects of this disclosure are based on the recognition that such fusion proteins may exhibit an increased nucleic acid editing efficiency as compared to fusion proteins not comprising an UGI domain. Domains such as the deaminase domains and UGI domains have been described and are within the scope of this disclosure. For example domains such as deaminase domains and UGI domains have been described in Provisional Application Nos. 62/245,828, filed Oct. 23, 2015, 62/279,346 filed Jan. 15, 2016, 62/311,763 filed Mar. 22, 2016, 62/322,178 filed Apr. 13, 2016, 62/357,352 filed Jun. 30, 2016, 62/370,700 filed Aug. 3, 2016, 62/398,490 filed Sep. 22, 2016, and 62/408,686 filed Oct. 14, 2016; the entire contents of each is incorporated by reference herein. It should be appreciated that the deaminase domains and UGI domains described in the foregoing references are within the scope of this disclosure and may be fused with any of the Cas9 proteins provided herein.

[0065] In some embodiments, the effector domain of the fusion protein is a nuclease domain. In some embodiments, the nuclease domain is a FokI DNA cleavage domain. In some embodiments, the fusion protein dimerizes. In certain embodiments, the dimer of the fusion protein is active. For example, two Fok1 DNA cleavage domains may dimerize to cleave a nucleic acid.

[0066] In some embodiments, the Cas9 protein is fused to a second Cas9 protein. In some embodiments, the second Cas9 protein is the Cas9 protein of any one of claims 1-345. In some embodiments, the second Cas9 protein is fused to the N-terminus of the fusion protein. In some embodiments, the second Cas9 protein is fused to the C-terminus of the fusion protein. In some embodiments, the Cas9 protein and the second Cas9 protein are fused via a second linker. In some embodiments, the second linker comprises a (GGGGS), (SEQ ID NO: 5), a (G), (SEQ ID NO: 5087), an (EAAAK), (SEQ ID NO: 6), a (GGS), (SEQ ID NO: 5088), an SGSETPGTSESATPES (SEQ ID NO: 7), or an (XP), (SEQ ID NO: 5089) motif, or a combination of any of these, wherein n is independently an integer between 1 and 30. In some embodiments, the second linker comprises a (GGS) 3 (SEQ ID NO: 5088) motif.

[0067] Some aspects of this disclosure provide complexes comprising a Cas9 protein, or a Cas9 fusion protein as provided herein, and a guide RNA bound to the Cas9 protein, or the Cas9 fusion protein.

[0068] In some embodiments, the target sequence is a DNA sequence. In some embodiments, the target sequence is a sequence in the genome of a mammal. In some embodiments, the target sequence is a sequence in the genome of a human. In some embodiments, the 3′-end of the target sequence is not immediately adjacent to the canonical PAM sequence (5′-NGG-3′).

[0069] Some aspects of this disclosure provide methods of using the Cas9 proteins, fusion proteins, or complexes provided herein. For example, some aspects of this disclosure provide methods comprising contacting a DNA molecule (a) with a Cas9 protein or a fusion protein as provided herein and a guide RNA, wherein the guide RNA is about 15-100 nucleotides long and comprises a sequence of at least 10 contiguous nucleotides that is complementary to a target sequence; or (b) with a Cas9 protein, a Cas9 fusion protein, or a Cas9 protein or fusion protein complex with a gRNA as provided herein. In some embodiments, the 3′-end of the target sequence is not immediately adjacent to the canonical PAM sequence (5′-NGG-3′). In some embodiments, the 3′-end of the target sequence is immediately adjacent to an AGC, GAG, TTT, GTG, or CAA sequence. In some embodiments, the target DNA sequence comprises a sequence associated with a disease or disorder. In some embodiments, the target DNA sequence comprises a point mutation associated with a disease or disorder. In some embodiments, the activity of the Cas9 protein, the Cas9 fusion protein, or the complex results in correction of the point mutation. In some embodiments, the step of contacting is performed in vivo in a subject.

[0070] Some aspects of this disclosure provide kits comprising a nucleic acid construct, comprising (a) a nucleotide sequence encoding a Cas9 protein or a Cas9 fusion protein as provided herein; and (b) a heterologous promoter that drives expression of the sequence of (a). In some embodiments, the kit further comprises an expression construct encoding a guide RNA backbone, wherein the construct comprises a cloning site positioned to allow the cloning of a nucleic acid sequence identical or complementary to a target sequence into the guide RNA backbone.

[0071] Some aspects of this disclosure provide polynucleotides encoding any of the Cas9 proteins, Cas9 fusion proteins, or guide RNA bound to the Cas9 protein or Cas9 fusion protein provided herein. Some aspects of this disclosure provide vectors comprising such polynucleotides. In some embodiments, the vector comprises a heterologous promoter driving expression of the polynucleotide.

[0072] Some aspects of this disclosure provide cells comprising any of the Cas9 proteins, fusion proteins, nucleic acid molecules, and/or a vectors as provided herein.

[0073] The summary above is meant to illustrate, in a non-limiting manner, some of the embodiments, advantages, features, and uses of the technology disclosed herein. Other embodiments, advantages, features, and uses of the technology disclosed herein will be apparent from the Detailed Description, the Drawings, the Examples, and the Claims.

### BRIEF DESCRIPTION OF THE DRAWINGS

[0074] FIG. 1 shows the activity of wild-type Streptococcus pyogenes Cas9 on canonical PAM libraries and non-canonical PAM libraries.

[0075] FIG. 2 shows the activity of exemplary evolved Cas9 clones on a PAM library after directed evolution.

[0076] FIG. 3 shows a comparison of wild-type and evolved Cas9 in a mammalian GFP activation assay.

[0077] FIGS. 4A to 4B show the binding activity of Cas9 (pJH306) and evolved Cas9 proteins with an 5′-NGG-3′ PAM sequence using GFP as a readout. On 5′-NGG-3′ PAMs, many of the evolved Cas9 proteins showed increased Cas9 binding activity relative to wild-type Cas9 based on an increase in GFP fluorescence signal. FIG. 4A is a graph representing Cas9 binding activity as a function of % cells above the background fluorescence. FIG. 4B is a graph showing Cas9 binding activity as a function of mean fluorescence. Cas9 proteins used in these experiments were dCas9 proteins fused to a VPR transcriptional activator.

[0078] FIGS. 5A to 5B show the binding activity of wild type dCas9-VPR (pJH306) and evolved dCas9-VPR proteins with an NNN PAM sequence using GFP as a readout. On a library of NNN PAMs, many of the evolved Cas9 proteins showed increased Cas9 binding activity relative to wild-type Cas9 based on an increase in GFP fluorescence signal. FIG. 5A is a graph representing Cas9 binding activity as a function of % cells above background fluorescence. FIG. 5B is a graph showing Cas9 binding activity as a function of mean fluorescence. Cas9 proteins used in these experiments were dCas9 proteins fused to VPR.

[0079] FIG. 6 shows dCas9-VPR on all 64 PAM sequences as demonstrated by mean fluorescence on transfected cells gated by iRFP fluorescence. WT dCas9-VPR is pJH306.

[0080] FIG. 7 shows in vitro cutting assay. On the gel, WT is wild-type Cas9 (SEQ ID NO: 9), and 1 is Cas9 (SEQ ID NO: 9) with the E1219V mutation.

[0081] FIG. 8 shows a Cas9 fusion protein that can be used to modulate PAM specificity. One possible configuration for a linked Cas9-dCas9 system that could be used for increasing Cas9 targeting to non-canonical PAMs is shown. dCas9 binding to 5′-NGG-3′ or another PAM could localize Cas9 to an area close to target 2. This localization could help Cas9 cut a previously inaccessible PAM.

[0082] FIGS. 9A to 9B show dCas9-VPR binding activity on the NNNNN PAM Library. FIG. 9A is a graph representing dCas9-VPR binding activity on the NNNNN PAM library as a function of the % cells above background fluorescence. FIG. 9B is a graph representing dCas9-VPR binding activity on the NNNNN PAM library as a function of mean fluorescence.

[0083] FIG. 10 shows Cas9 cutting activity using % of cells with GFP loss as a readout. Cas9 proteins were tested with two sgRNAs, which either targeted the canonical 5′-NGG-3′ PAM or a GAT PAM within a GFP gene.

[0084] FIG. 11 illustrates double-stranded DNA substrate bound by Cas9:DNA editing enzyme:sgRNA complexes. The DNA editing enzyme may be, without limitation, a nuclease, nickase, recombinase, deaminase, methyltransferase, methylase, acetylase, or acetyltransferase.

[0085] FIG. 12 shows the results of the PAM depletion assay. pJH760 was tested in the PAM depletion assay on four new targets: re2, VEGF, CLTA, and CCR5D.

[0086] FIG. 13 shows GFP cutting in mammalian cells.

[0087] FIG. 14 shows the results of a PAM depletion assay to test pJH760 (xCas9 v1.0) on the re2 target.

[0088] FIG. 15 shows the results of a PAM depletion assay to test pJH760 (xCas9 v1.0) on the VEGF target.

[0089] FIG. 16 shows the results of a PAM depletion assay to test pJH760 (xCas9 v1.0) on the CLTA target.

[0090] FIG. 17 shows the results of a PAM depletion assay to test pJH760 (xCas9 v1.0) on the CCR5D target.

[0091] FIG. 18 shows the results of a PAM depletion assay to test four xCas9v3 mutants on the re2 target.

[0092] FIG. 19 shows the results of a PAM depletion assay to test four xCas9v3 mutants on the VEGF target.

[0093] FIG. 20 shows the results of a PAM depletion assay to test four xCas9v3 mutants on the CLTA target.

### DEFINITIONS

[0094] As used herein and in the claims, the singular forms “a,” “an,” and “the” include the singular and the plural reference unless the context clearly indicates otherwise. Thus, for example, a reference to “an agent” includes a single agent and a plurality of such agents.

[0095] The term “Cas9” or “Cas9 nuclease” refers to an RNA-guided nuclease comprising a Cas9 protein, or a fragment thereof (e.g., a protein comprising an active or inactive DNA cleavage domain of Cas9, and/or the gRNA binding domain of Cas9). A Cas9 nuclease is also referred to sometimes as a casn1 nuclease or a CRISPR (clustered regularly interspaced short palindromic repeat)-associated nuclease. CRISPR is an adaptive immune system that provides protection against mobile genetic elements (viruses, transposable elements and conjugative plasmids). CRISPR clusters contain spacers, sequences complementary to antecedent mobile elements, and target invading nucleic acids. CRISPR clusters are transcribed and processed into CRISPR RNA (crRNA). In type II CRISPR systems correct processing of pre-crRNA requires a trans-encoded small RNA (tracrRNA), endogenous ribonuclease 3 (rnc) and a Cas9 protein. The tracrRNA serves as a guide for ribonuclease 3-aided processing of pre-crRNA. Subsequently, Cas9/crRNA/tracrRNA endonucleolytically cleaves linear or circular dsDNA target complementary to the spacer. The target strand not complementary to crRNA is first cut endonucleolytically, then trimmed 3′-5′ exonucleolytically. In nature, DNA-binding and cleavage typically requires protein and both RNAs. However, single guide RNAs (“sgRNA”, or simply “gNRA”) can be engineered so as to incorporate aspects of both the crRNA and tracrRNA into a single RNA species. See, e.g., Jinek M., Chylinski K., Fonfara I., Hauer M., Doudna J. A., Charpentier E. Science 337:816-821 (2012), the entire contents of which are hereby incorporated by reference. Cas9 recognizes a short motif in the CRISPR repeat sequences (the PAM or protospacer adjacent motif) to help distinguish self versus non-self. Cas9 nuclease sequences and structures are well known to those of skill in the art (see, e.g., “Complete genome sequence of an MI strain of Streptococcus pyogenes.” Ferretti et al., J. J., McShan W. M., Ajdic D. J., Savic D. J., Savic G., Lyon K., Primeaux C., Sezate S., Suvorov A. N., Kenton S., Lai H. S., Lin S. P., Qian Y., Jia H. G., Najar F. Z., Ren Q., Zhu H., Song L., White J., Yuan X., Clifton S. W., Roc B. A., McLaughlin R. E., Proc. Natl. Acad. Sci. U.S.A. 98:4658-4663 (2001); “CRISPR RNA maturation by trans-encoded small RNA and host factor RNase III.” Deltcheva E., Chylinski K., Sharma C. M., Gonzales K., Chao Y., Pirzada Z. A., Eckert M. R., Vogel J., Charpentier E., Nature 471:602-607 (2011); and “A programmable dual-RNA-guided DNA endonuclease in adaptive bacterial immunity.” Jinek M., Chylinski K., Fonfara I., Hauer M., Doudna J. A., Charpentier E. Science 337:816-821 (2012), the entire contents of each of which are incorporated herein by reference). Cas9 orthologs have been described in various species, including, but not limited to, S. pyogenes and S. thermophilus. Additional suitable Cas9 nucleases and sequences will be apparent to those of skill in the art based on this disclosure, and such Cas9 nucleases and sequences include Cas9 sequences from the organisms and loci disclosed in Chylinski, Rhun, and Charpentier, “The tracrRNA and Cas9 families of type II CRISPR-Cas immunity systems” (2013) RNA Biology 10:5, 726-737; the entire contents of which are incorporated herein by reference. In some embodiments, a Cas9 nuclease has an inactive (e.g., an inactivated) DNA cleavage domain.

[0096] A nuclease-inactivated Cas9 protein may interchangeably be referred to as a “dCas9” protein (for nuclease-“dead” Cas9). Methods for generating a Cas9 having an inactive DNA cleavage domain are known (See, e.g., Jinek et al., Science. 337:816-821 (2012); Qi et al., “Repurposing CRISPR as an RNA-Guided Platform for Sequence-Specific Control of Gene Expression” (2013) Cell. 28; 152 (5): 1173-83, the entire contents of each of which are incorporated herein by reference). For example, the DNA cleavage domain of Cas9 is known to include two subdomains, the HNH nuclease subdomain and the RuvC1 subdomain. The HNH subdomain cleaves the strand complementary to the gRNA, whereas the RuvC1 subdomain cleaves the non-complementary strand. Mutations within these subdomains can silence the nuclease activity of Cas9. For example, the mutations D10A and H840A completely inactivate the nuclease activity of S. pyogenes Cas9 (Jinek et al., Science. 337:816-821 (2012); Qi et al., Cell. 28; 152 (5): 1173-83 (2013).

[0097] In some embodiments, proteins comprising fragments of Cas9 are provided. For example, in some embodiments, a protein comprises one of two Cas9 domains: (1) the gRNA binding domain of Cas9; or (2) the DNA cleavage domain of Cas9. In some embodiments, proteins comprising Cas9 or fragments thereof are referred to as “Cas9 variants.” A Cas9 variant shares homology to Cas9. For example a Cas9 variant is at least about 70% identical, at least about 80% identical, at least about 90% identical, at least about 95% identical, at least about 96% identical, at least about 97% identical, at least about 98% identical, at least about 99% identical, at least about 99.5% identical, or at least about 99.9% to wild type Cas9. In some embodiments, the Cas9 variant comprises a fragment of Cas9 (e.g., a gRNA binding domain or a DNA-cleavage domain), such that the fragment is at least about 70% identical, at least about 80% identical, at least about 90% identical, at least about 95% identical, at least about 96% identical, at least about 97% identical, at least about 98% identical, at least about 99% identical, at least about 99.5% identical, or at least about 99.9% to the corresponding fragment of wild type Cas9. In some embodiments, wild type Cas9 corresponds to Cas9 from Streptococcus pyogenes (NCBI Reference Sequence: NC_017053.1, SEQ ID NO:1 (nucleotide); SEQ ID NO:2 (amino acid)).

(SEQ ID NO: 1)
ATGGATAAGAAATACTCAATAGGCTTAGATATCGGCACAAATAGCGTCGGATGGGCGGTGATCACTGATGATTATAA
GGTTCCGTCTAAAAAGTTCAAGGTTCTGGGAAATACAGACCGCCACAGTATCAAAAAAAATCTTATAGGGGCTCTTT
TATTTGGCAGTGGAGAGACAGCGGAAGCGACTCGTCTCAAACGGACAGCTCGTAGAAGGTATACACGTCGGAAGAAT
CGTATTTGTTATCTACAGGAGATTTTTTCAAATGAGATGGCGAAAGTAGATGATAGTTTCTTTCATCGACTTGAAGA
GTCTTTTTTGGTGGAAGAAGACAAGAAGCATGAACGTCATCCTATTTTTGGAAATATAGTAGATGAAGTTGCTTATC
ATGAGAAATATCCAACTATCTATCATCTGCGAAAAAAATTGGCAGATTCTACTGATAAAGCGGATTTGCGCTTAATC
TATTTGGCCTTAGCGCATATGATTAAGTTTCGTGGTCATTTTTTGATTGAGGGAGATTTAAATCCTGATAATAGTGA
TGTGGACAAACTATTTATCCAGTTGGTACAAATCTACAATCAATTATTTGAAGAAAACCCTATTAACGCAAGTAGAG
TAGATGCTAAAGCGATTCTTTCTGCACGATTGAGTAAATCAAGACGATTAGAAAATCTCATTGCTCAGCTCCCCGGT
GAGAAGAGAAATGGCTTGTTTGGGAATCTCATTGCTTTGTCATTGGGATTGACCCCTAATTTTAAATCAAATTTTGA
TTTGGCAGAAGATGCTAAATTACAGCTTTCAAAAGATACTTACGATGATGATTTAGATAATTTATTGGCGCAAATTG
GAGATCAATATGCTGATTTGTTTTTGGCAGCTAAGAATTTATCAGATGCTATTTTACTTTCAGATATCCTAAGAGTA
AATAGTGAAATAACTAAGGCTCCCCTATCAGCTTCAATGATTAAGCGCTACGATGAACATCATCAAGACTTGACTCT
TTTAAAAGCTTTAGTTCGACAACAACTTCCAGAAAAGTATAAAGAAATCTTTTTTGATCAATCAAAAAACGGATATG
CAGGTTATATTGATGGGGGAGCTAGCCAAGAAGAATTTTATAAATTTATCAAACCAATTTTAGAAAAAATGGATGGT
ACTGAGGAATTATTGGTGAAACTAAATCGTGAAGATTTGCTGCGCAAGCAACGGACCTTTGACAACGGCTCTATTCC
CCATCAAATTCACTTGGGTGAGCTGCATGCTATTTTGAGAAGACAAGAAGACTTTTATCCATTTTTAAAAGACAATC
GTGAGAAGATTGAAAAAATCTTGACTTTTCGAATTCCTTATTATGTTGGTCCATTGGCGCGTGGCAATAGTCGTTTT
GCATGGATGACTCGGAAGTCTGAAGAAACAATTACCCCATGGAATTTTGAAGAAGTTGTCGATAAAGGTGCTTCAGC
TCAATCATTTATTGAACGCATGACAAACTTTGATAAAAATCTTCCAAATGAAAAAGTACTACCAAAACATAGTTTGC
TTTATGAGTATTTTACGGTTTATAACGAATTGACAAAGGTCAAATATGTTACTGAGGGAATGCGAAAACCAGCATTT
CTTTCAGGTGAACAGAAGAAAGCCATTGTTGATTTACTCTTCAAAACAAATCGAAAAGTAACCGTTAAGCAATTAAA
AGAAGATTATTTCAAAAAAATAGAATGTTTTGATAGTGTTGAAATTTCAGGAGTTGAAGATAGATTTAATGCTTCAT
TAGGCGCCTACCATGATTTGCTAAAAATTATTAAAGATAAAGATTTTTTGGATAATGAAGAAAATGAAGATATCTTA
GAGGATATTGTTTTAACATTGACCTTATTTGAAGATAGGGGGATGATTGAGGAAAGACTTAAAACATATGCTCACCT
CTTTGATGATAAGGTGATGAAACAGCTTAAACGTCGCCGTTATACTGGTTGGGGACGTTTGTCTCGAAAATTGATTA
ATGGTATTAGGGATAAGCAATCTGGCAAAACAATATTAGATTTTTTGAAATCAGATGGTTTTGCCAATCGCAATTTT
ATGCAGCTGATCCATGATGATAGTTTGACATTTAAAGAAGATATTCAAAAAGCACAGGTGTCTGGACAAGGCCATAG
TTTACATGAACAGATTGCTAACTTAGCTGGCAGTCCTGCTATTAAAAAAGGTATTTTACAGACTGTAAAAATTGTTG
ATGAACTGGTCAAAGTAATGGGGCATAAGCCAGAAAATATCGTTATTGAAATGGCACGTGAAAATCAGACAACTCAA
AAGGGCCAGAAAAATTCGCGAGAGCGTATGAAACGAATCGAAGAAGGTATCAAAGAATTAGGAAGTCAGATTCTTAA
AGAGCATCCTGTTGAAAATACTCAATTGCAAAATGAAAAGCTCTATCTCTATTATCTACAAAATGGAAGAGACATGT
ATGTGGACCAAGAATTAGATATTAATCGTTTAAGTGATTATGATGTCGATCACATTGTTCCACAAAGTTTCATTAAA
GACGATTCAATAGACAATAAGGTACTAACGCGTTCTGATAAAAATCGTGGTAAATCGGATAACGTTCCAAGTGAAGA
AGTAGTCAAAAAGATGAAAAACTATTGGAGACAACTTCTAAACGCCAAGTTAATCACTCAACGTAAGTTTGATAATT
TAACGAAAGCTGAACGTGGAGGTTTGAGTGAACTTGATAAAGCTGGTTTTATCAAACGCCAATTGGTTGAAACTCGC
CAAATCACTAAGCATGTGGCACAAATTTTGGATAGTCGCATGAATACTAAATACGATGAAAATGATAAACTTATTCG
AGAGGTTAAAGTGATTACCTTAAAATCTAAATTAGTTTCTGACTTCCGAAAAGATTTCCAATTCTATAAAGTACGTG
AGATTAACAATTACCATCATGCCCATGATGCGTATCTAAATGCCGTCGTTGGAACTGCTTTGATTAAGAAATATCCA
AAACTTGAATCGGAGTTTGTCTATGGTGATTATAAAGTTTATGATGTTCGTAAAATGATTGCTAAGTCTGAGCAAGA
AATAGGCAAAGCAACCGCAAAATATTTCTTTTACTCTAATATCATGAACTTCTTCAAAACAGAAATTACACTTGCAA
ATGGAGAGATTCGCAAACGCCCTCTAATCGAAACTAATGGGGAAACTGGAGAAATTGTCTGGGATAAAGGGCGAGAT
TTTGCCACAGTGCGCAAAGTATTGTCCATGCCCCAAGTCAATATTGTCAAGAAAACAGAAGTACAGACAGGCGGATT
CTCCAAGGAGTCAATTTTACCAAAAAGAAATTCGGACAAGCTTATTGCTCGTAAAAAAGACTGGGATCCAAAAAAAT
ATGGTGGTTTTGATAGTCCAACGGTAGCTTATTCAGTCCTAGTGGTTGCTAAGGTGGAAAAAGGGAAATCGAAGAAG
TTAAAATCCGTTAAAGAGTTACTAGGGATCACAATTATGGAAAGAAGTTCCTTTGAAAAAAATCCGATTGACTTTTT
AGAAGCTAAAGGATATAAGGAAGTTAAAAAAGACTTAATCATTAAACTACCTAAATATAGTCTTTTTGAGTTAGAAA
ACGGTCGTAAACGGATGCTGGCTAGTGCCGGAGAATTACAAAAAGGAAATGAGCTGGCTCTGCCAAGCAAATATGTG
AATTTTTTATATTTAGCTAGTCATTATGAAAAGTTGAAGGGTAGTCCAGAAGATAACGAACAAAAACAATTGTTTGT
GGAGCAGCATAAGCATTATTTAGATGAGATTATTGAGCAAATCAGTGAATTTTCTAAGCGTGTTATTTTAGCAGATG
CCAATTTAGATAAAGTTCTTAGTGCATATAACAAACATAGAGACAAACCAATACGTGAACAAGCAGAAAATATTATT
CATTTATTTACGTTGACGAATCTTGGAGCTCCCGCTGCTTTTAAATATTTTGATACAACAATTGATCGTAAACGATA
TACGTCTACAAAAGAAGTTTTAGATGCCACTCTTATCCATCAATCCATCACTGGTCTTTATGAAACACGCATTGATT
TGAGTCAGCTAGGAGGTGACTGA
(SEQ ID NO: 2)
MDKKYSIGLDIGTNSVGWAVITDDYKVPSKKFKVLGNTDRHSIKKNLIGALLFGSGETAEATRLKRTARRRYTRRKN
RICYLQEIFSNEMAKVDDSFFHRLEESFLVEEDKKHERHPIFGNIVDEVAYHEKYPTIYHLRKKLADSTDKADLRLI
YLALAHMIKFRGHFLIEGDLNPDNSDVDKLFIQLVQIYNQLFEENPINASRVDAKAILSARLSKSRRLENLIAQLPG
EKRNGLFGNLIALSLGLTPNFKSNFDLAEDAKLQLSKDTYDDDLDNLLAQIGDQYADLFLAAKNLSDAILLSDILRV
NSEITKAPLSASMIKRYDEHHQDLTLLKALVRQQLPEKYKEIFFDQSKNGYAGYIDGGASQEEFYKFIKPILEKMDG
TEELLVKLNREDLLRKQRTFDNGSIPHQIHLGELHAILRRQEDFYPFLKDNREKIEKILTFRIPYYVGPLARGNSRF
AWMTRKSEETITPWNFEEVVDKGASAQSFIERMTNFDKNLPNEKVLPKHSLLYEYFTVYNELTKVKYVTEGMRKPAF
LSGEQKKAIVDLLFKTNRKVTVKQLKEDYFKKIECFDSVEISGVEDRFNASLGAYHDLLKIIKDKDFLDNEENEDIL
EDIVLTLTLFEDRGMIEERLKTYAHLFDDKVMKQLKRRRYTGWGRLSRKLINGIRDKQSGKTILDFLKSDGFANRNF
MQLIHDDSLTFKEDIQKAQVSGQGHSLHEQIANLAGSPAIKKGILOTVKIVDELVKVMGHKPENIVIEMARENQTTQ
KGQKNSRERMKRIEEGIKELGSQILKEHPVENTQLQNEKLYLYYLQNGRDMYVDQELDINRLSDYDVDHIVPQSFIK
DDSIDNKVLTRSDKNRGKSDNVPSEEVVKKMKNYWRQLLNAKLITQRKFDNLTKAERGGLSELDKAGFIKROLVETR
QITKHVAQILDSRMNTKYDENDKLIREVKVITLKSKLVSDFRKDFQFYKVREINNYHHAHDAYLNAVVGTALIKKYP
KLESEFVYGDYKVYDVRKMIAKSEQEIGKATAKYFFYSNIMNFFKTEITLANGEIRKRPLIETNGETGEIVWDKGRD
FATVRKVLSMPQVNIVKKTEVQTGGFSKESILPKRNSDKLIARKKDWDPKKYGGEDSPTVAYSVLVVAKVEKGKSKK
LKSVKELLGITIMERSSFEKNPIDFLEAKGYKEVKKDLIIKLPKYSLFELENGRKRMLASAGELQKGNELALPSKYV
NFLYLASHYEKLKGSPEDNEQKQLFVEQHKHYLDEIIEQISEFSKRVILADANLDKVLSAYNKHRDKPIREQAENII
HLFTLTNLGAPAAFKYFDTTIDRKRYTSTKEVLDATLIHQSITGLYETRIDLSQLGGD
(single underline: HNH domain; double underline: RuvC domain)

[0098] In some embodiments, wild type Cas9 corresponds to, or comprises SEQ ID NO:3 (nucleotide) and/or SEQ ID NO: 4 (amino acid):

(SEQ ID NO: 3)
ATGGATAAAAAGTATTCTATTGGTTTAGACATCGGCACTAATTCCGTTGGATGGGCTGTCATAACCGATGAATACAA
AGTACCTTCAAAGAAATTTAAGGTGTTGGGGAACACAGACCGTCATTCGATTAAAAAGAATCTTATCGGTGCCCTCC
TATTCGATAGTGGCGAAACGGCAGAGGCGACTCGCCTGAAACGAACCGCTCGGAGAAGGTATACACGTCGCAAGAAC
CGAATATGTTACTTACAAGAAATTTTTAGCAATGAGATGGCCAAAGTTGACGATTCTTTCTTTCACCGTTTGGAAGA
GTCCTTCCTTGTCGAAGAGGACAAGAAACATGAACGGCACCCCATCTTTGGAAACATAGTAGATGAGGTGGCATATC
ATGAAAAGTACCCAACGATTTATCACCTCAGAAAAAAGCTAGTTGACTCAACTGATAAAGCGGACCTGAGGTTAATC
TACTTGGCTCTTGCCCATATGATAAAGTTCCGTGGGCACTTTCTCATTGAGGGTGATCTAAATCCGGACAACTCGGA
TGTCGACAAACTGTTCATCCAGTTAGTACAAACCTATAATCAGTTGTTTGAAGAGAACCCTATAAATGCAAGTGGCG
TGGATGCGAAGGCTATTCTTAGCGCCCGCCTCTCTAAATCCCGACGGCTAGAAAACCTGATCGCACAATTACCCGGA
GAGAAGAAAAATGGGTTGTTCGGTAACCTTATAGCGCTCTCACTAGGCCTGACACCAAATTTTAAGTCGAACTTCGA
CTTAGCTGAAGATGCCAAATTGCAGCTTAGTAAGGACACGTACGATGACGATCTCGACAATCTACTGGCACAAATTG
GAGATCAGTATGCGGACTTATTTTTGGCTGCCAAAAACCTTAGCGATGCAATCCTCCTATCTGACATACTGAGAGTT
AATACTGAGATTACCAAGGCGCCGTTATCCGCTTCAATGATCAAAAGGTACGATGAACATCACCAAGACTTGACACT
TCTCAAGGCCCTAGTCCGTCAGCAACTGCCTGAGAAATATAAGGAAATATTCTTTGATCAGTCGAAAAACGGGTACG
CAGGTTATATTGACGGCGGAGCGAGTCAAGAGGAATTCTACAAGTTTATCAAACCCATATTAGAGAAGATGGATGGG
ACGGAAGAGTTGCTTGTAAAACTCAATCGCGAAGATCTACTGCGAAAGCAGCGGACTTTCGACAACGGTAGCATTCC
ACATCAAATCCACTTAGGCGAATTGCATGCTATACTTAGAAGGCAGGAGGATTTTTATCCGTTCCTCAAAGACAATC
GTGAAAAGATTGAGAAAATCCTAACCTTTCGCATACCTTACTATGTGGGACCCCTGGCCCGAGGGAACTCTCGGTTC
GCATGGATGACAAGAAAGTCCGAAGAAACGATTACTCCATGGAATTTTGAGGAAGTTGTCGATAAAGGTGCGTCAGC
TCAATCGTTCATCGAGAGGATGACCAACTTTGACAAGAATTTACCGAACGAAAAAGTATTGCCTAAGCACAGTTTAC
TTTACGAGTATTTCACAGTGTACAATGAACTCACGAAAGTTAAGTATGTCACTGAGGGCATGCGTAAACCCGCCTTT
CTAAGCGGAGAACAGAAGAAAGCAATAGTAGATCTGTTATTCAAGACCAACCGCAAAGTGACAGTTAAGCAATTGAA
AGAGGACTACTTTAAGAAAATTGAATGCTTCGATTCTGTCGAGATCTCCGGGGTAGAAGATCGATTTAATGCGTCAC
TTGGTACGTATCATGACCTCCTAAAGATAATTAAAGATAAGGACTTCCTGGATAACGAAGAGAATGAAGATATCTTA
GAAGATATAGTGTTGACTCTTACCCTCTTTGAAGATCGGGAAATGATTGAGGAAAGACTAAAAACATACGCTCACCT
GTTCGACGATAAGGTTATGAAACAGTTAAAGAGGCGTCGCTATACGGGCTGGGGACGATTGTCGCGGAAACTTATCA
ACGGGATAAGAGACAAGCAAAGTGGTAAAACTATTCTCGATTTTCTAAAGAGCGACGGCTTCGCCAATAGGAACTTT
ATGCAGCTGATCCATGATGACTCTTTAACCTTCAAAGAGGATATACAAAAGGCACAGGTTTCCGGACAAGGGGACTC
ATTGCACGAACATATTGCGAATCTTGCTGGTTCGCCAGCCATCAAAAAGGGCATACTCCAGACAGTCAAAGTAGTGG
ATGAGCTAGTTAAGGTCATGGGACGTCACAAACCGGAAAACATTGTAATCGAGATGGCACGCGAAAATCAAACGACT
CAGAAGGGGCAAAAAAACAGTCGAGAGCGGATGAAGAGAATAGAAGAGGGTATTAAAGAACTGGGCAGCCAGATCTT
AAAGGAGCATCCTGTGGAAAATACCCAATTGCAGAACGAGAAACTTTACCTCTATTACCTACAAAATGGAAGGGACA
TGTATGTTGATCAGGAACTGGACATAAACCGTTTATCTGATTACGACGTCGATCACATTGTACCCCAATCCTTTTTG
AAGGACGATTCAATCGACAATAAAGTGCTTACACGCTCGGATAAGAACCGAGGGAAAAGTGACAATGTTCCAAGCGA
GGAAGTCGTAAAGAAAATGAAGAACTATTGGCGGCAGCTCCTAAATGCGAAACTGATAACGCAAAGAAAGTTCGATA
ACTTAACTAAAGCTGAGAGGGGTGGCTTGTCTGAACTTGACAAGGCCGGATTTATTAAACGTCAGCTCGTGGAAACC
CGCCAAATCACAAAGCATGTTGCACAGATACTAGATTCCCGAATGAATACGAAATACGACGAGAACGATAAGCTGAT
TCGGGAAGTCAAAGTAATCACTTTAAAGTCAAAATTGGTGTCGGACTTCAGAAAGGATTTTCAATTCTATAAAGTTA
GGGAGATAAATAACTACCACCATGCGCACGACGCTTATCITAATGCCGTCGTAGGGACCGCACTCATTAAGAAATAC
CCGAAGCTAGAAAGTGAGTTTGTGTATGGTGATTACAAAGTTTATGACGTCCGTAAGATGATCGCGAAAAGCGAACA
GGAGATAGGCAAGGCTACAGCCAAATACTTCTTTTATTCTAACATTATGAATTTCTTTAAGACGGAAATCACTCTGG
CAAACGGAGAGATACGCAAACGACCTTTAATTGAAACCAATGGGGAGACAGGTGAAATCGTATGGGATAAGGGCCGG
GACTTCGCGACGGTGAGAAAAGTTTTGTCCATGCCCCAAGTCAACATAGTAAAGAAAACTGAGGTGCAGACCGGAGG
GTTTTCAAAGGAATCGATTCTTCCAAAAAGGAATAGTGATAAGCTCATCGCTCGTAAAAAGGACTGGGACCCGAAAA
AGTACGGTGGCTTCGATAGCCCTACAGTTGCCTATTCTGTCCTAGTAGTGGCAAAAGTTGAGAAGGGAAAATCCAAG
AAACTGAAGTCAGTCAAAGAATTATTGGGGATAACGATTATGGAGCGCTCGTCTTTTGAAAAGAACCCCATCGACTT
CCTTGAGGCGAAAGGTTACAAGGAAGTAAAAAAGGATCTCATAATTAAACTACCAAAGTATAGTCTGTTTGAGTTAG
AAAATGGCCGAAAACGGATGTTGGCTAGCGCCGGAGAGCTTCAAAAGGGGAACGAACTCGCACTACCGTCTAAATAC
GTGAATTTCCTGTATTTAGCGTCCCATTACGAGAAGTTGAAAGGTTCACCTGAAGATAACGAACAGAAGCAACTTTT
TGTTGAGCAGCACAAACATTATCTCGACGAAATCATAGAGCAAATTTCGGAATTCAGTAAGAGAGTCATCCTAGCTG
ATGCCAATCTGGACAAAGTATTAAGCGCATACAACAAGCACAGGGATAAACCCATACGTGAGCAGGCGGAAAATATT
ATCCATTTGTTTACTCTTACCAACCTCGGCGCTCCAGCCGCATTCAAGTATTTTGACACAACGATAGATCGCAAACG
ATACACTTCTACCAAGGAGGTGCTAGACGCGACACTGATTCACCAATCCATCACGGGATTATATGAAACTCGGATAG
ATTTGTCACAGCTTGGGGGTGACGGATCCCCCAAGAAGAAGAGGAAAGTCTCGAGCGACTACAAAGACCATGACGGT
GATTATAAAGATCATGACATCGATTACAAGGATGACGATGACAAGGCTGCAGGA
(SEQ ID NO: 4)
MDKKYSIGLAIGTNSVGWAVITDEYKVPSKKFKVLGNTDRHSIKKNLIGALLFDSGETAEATRLKRTARRRYTRRKN
RICYLQEIFSNEMAKVDDSFFHRLEESFLVEEDKKHERHPIFGNIVDEVAYHEKYPTIYHLRKKLVDSTDKADLRLI
YLALAHMIKFRGHFLIEGDLNPDNSDVDKLFIQLVQTYNQLFEENPINASGVDAKAILSARLSKSRRLENLIAQLPG
EKKNGLFGNLIALSLGLTPNFKSNFDLAEDAKLQLSKDTYDDDLDNLLAQIGDQYADLFLAAKNLSDAILLSDILRV
NTEITKAPLSASMIKRYDEHHQDLTLLKALVRQQLPEKYKEIFFDQSKNGYAGYIDGGASQEEFYKFIKPILEKMDG
TEELLVKLNREDLLRKQRTFDNGSIPHQIHLGELHAILRRQEDFYPFLKDNREKIEKILTFRIPYYVGPLARGNSRF
AWMTRKSEETITPWNFEEVVDKGASAQSFIERMTNFDKNLPNEKVLPKHSLLYEYFTVYNELTKVKYVTEGMRKPAF
LSGEQKKAIVDLLFKTNRKVTVKQLKEDYFKKIECFDSVEISGVEDRENASLGTYHDLLKIIKDKDELDNEENEDIL
EDIVLTLTLFEDREMIEERLKTYAHLEDDKVMKQLKRRRYTGWGRLSRKLINGIRDKQSGKTILDELKSDGFANRNE
MQLIHDDSLTFKEDIQKAQVSGQGDSLHEHIANLAGSPAIKKGILOTVKVVDELVKVMGRHKPENIVIEMARENQTT
QKGQKNSRERMKRIEEGIKELGSQILKEHPVENTQLQNEKLYLYYLQNGRDMYVDQELDINRLSDYDVDHIVPQSFL
KDDSIDNKVLTRSDKNRGKSDNVPSEEVVKKMKNYWRQLLNAKLITQRKFDNLTKAERGGLSELDKAGFIKRQLVET
RQITKHVAQILDSRMNTKYDENDKLIREVKVITLKSKLVSDERKDFOFYKVREINNYHHAHDAYLNAVVGTALIKKY
PKLESEFVYGDYKVYDVRKMIAKSEQEIGKATAKYFFYSNIMNFFKTEITLANGEIRKRPLIETNGETGEIVWDKGR
DFATVRKVLSMPOVNIVKKTEVOTGGFSKESILPKRNSDKLIARKKDWDPKKYGGFDSPTVAYSVLVVAKVEKGKSK
KLKSVKELLGITIMERSSFEKNPIDFLEAKGYKEVKKDLIIKLPKYSLFELENGRKRMLASAGELQKGNELALPSKY
VNFLYLASHYEKLKGSPEDNEQKQLFVEQHKHYLDEIIEQISEFSKRVILADANLDKVLSAYNKHRDKPIREQAENI
IHLFTLTNLGAPAAFKYFDTTIDRKRYTSTKEVLDATLIHQSITGLYETRIDLSQLGGD
(single underline: HNH domain; double underline: RuvC domain)

[0099] In some embodiments, wild type Cas9 corresponds to Cas9 from Streptococcus pyogenes (NCBI Reference Sequence: NC_002737.2. SEQ ID NO: 282 (nucleotide); and Uniport Reference Sequence: Q99ZW2. SEQ ID NO: 9 (amino acid).

(SEQ ID NO: 282)
ATGGATAAGAAATACTCAATAGGCTTAGATATCGGCACAAATAGCGTCGGATGGGCGGTGATCACTGATGAATATAA
GGTTCCGTCTAAAAAGTTCAAGGTTCTGGGAAATACAGACCGCCACAGTATCAAAAAAAATCTTATAGGGGCTCTTT
TATTTGACAGTGGAGAGACAGCGGAAGCGACTCGTCTCAAACGGACAGCTCGTAGAAGGTATACACGTCGGAAGAAT
CGTATTTGTTATCTACAGGAGATTTTTTCAAATGAGATGGCGAAAGTAGATGATAGTTTCTTTCATCGACTTGAAGA
GTCTTTTTTGGTGGAAGAAGACAAGAAGCATGAACGTCATCCTATTTTTGGAAATATAGTAGATGAAGTTGCTTATC
ATGAGAAATATCCAACTATCTATCATCTGCGAAAAAAATTGGTAGATTCTACTGATAAAGCGGATTTGCGCTTAATC
TATTTGGCCTTAGCGCATATGATTAAGTTTCGTGGTCATTTTTTGATTGAGGGAGATTTAAATCCTGATAATAGTGA
TGTGGACAAACTATTTATCCAGTTGGTACAAACCTACAATCAATTATTTGAAGAAAACCCTATTAACGCAAGTGGAG
TAGATGCTAAAGCGATTCTTTCTGCACGATTGAGTAAATCAAGACGATTAGAAAATCTCATTGCTCAGCTCCCCGGT
GAGAAGAAAAATGGCTTATTTGGGAATCTCATTGCTTTGTCATTGGGTTTGACCCCTAATTTTAAATCAAATTTTGA
TTTGGCAGAAGATGCTAAATTACAGCTTTCAAAAGATACTTACGATGATGATTTAGATAATTTATTGGCGCAAATTG
GAGATCAATATGCTGATTTGTTTTTGGCAGCTAAGAATTTATCAGATGCTATTTTACTTTCAGATATCCTAAGAGTA
AATACTGAAATAACTAAGGCTCCCCTATCAGCTTCAATGATTAAACGCTACGATGAACATCATCAAGACTTGACTCT
TTTAAAAGCTTTAGTTCGACAACAACTTCCAGAAAAGTATAAAGAAATCTTTTTTGATCAATCAAAAAACGGATATG
CAGGTTATATTGATGGGGGAGCTAGCCAAGAAGAATTTTATAAATTTATCAAACCAATTTTAGAAAAAATGGATGGT
ACTGAGGAATTATTGGTGAAACTAAATCGTGAAGATTTGCTGCGCAAGCAACGGACCTTTGACAACGGCTCTATTCC
CCATCAAATTCACTTGGGTGAGCTGCATGCTATTTTGAGAAGACAAGAAGACTTTTATCCATTTTTAAAAGACAATC
GTGAGAAGATTGAAAAAATCTTGACTTTTCGAATTCCTTATTATGTTGGTCCATTGGCGCGTGGCAATAGTCGTTTT
GCATGGATGACTCGGAAGTCTGAAGAAACAATTACCCCATGGAATTTTGAAGAAGTTGTCGATAAAGGTGCTTCAGC
TCAATCATTTATTGAACGCATGACAAACTTTGATAAAAATCTTCCAAATGAAAAAGTACTACCAAAACATAGTTTGC
TTTATGAGTATTTTACGGTTTATAACGAATTGACAAAGGTCAAATATGTTACTGAAGGAATGCGAAAACCAGCATTT
CTTTCAGGTGAACAGAAGAAAGCCATTGTTGATTTACTCTTCAAAACAAATCGAAAAGTAACCGTTAAGCAATTAAA
AGAAGATTATTTCAAAAAAATAGAATGTTTTGATAGTGTTGAAATTTCAGGAGTTGAAGATAGATTTAATGCTTCAT
TAGGTACCTACCATGATTTGCTAAAAATTATTAAAGATAAAGATTTTTTGGATAATGAAGAAAATGAAGATATCTTA
GAGGATATTGTTTTAACATTGACCTTATTTGAAGATAGGGAGATGATTGAGGAAAGACTTAAAACATATGCTCACCT
CTTTGATGATAAGGTGATGAAACAGCTTAAACGTCGCCGTTATACTGGTTGGGGACGTTTGTCTCGAAAATTGATTA
ATGGTATTAGGGATAAGCAATCTGGCAAAACAATATTAGATTTTTTGAAATCAGATGGTTTTGCCAATCGCAATTTT
ATGCAGCTGATCCATGATGATAGTTTGACATTTAAAGAAGACATTCAAAAAGCACAAGTGTCTGGACAAGGCGATAG
TTTACATGAACATATTGCAAATTTAGCTGGTAGCCCTGCTATTAAAAAAGGTATTTTACAGACTGTAAAAGTTGTTG
ATGAATTGGTCAAAGTAATGGGGCGGCATAAGCCAGAAAATATCGTTATTGAAATGGCACGTGAAAATCAGACAACT
CAAAAGGGCCAGAAAAATTCGCGAGAGCGTATGAAACGAATCGAAGAAGGTATCAAAGAATTAGGAAGTCAGATTCT
TAAAGAGCATCCTGTTGAAAATACTCAATTGCAAAATGAAAAGCTCTATCTCTATTATCTCCAAAATGGAAGAGACA
TGTATGTGGACCAAGAATTAGATATTAATCGTTTAAGTGATTATGATGTCGATCACATTGTTCCACAAAGTTTCCTT
AAAGACGATTCAATAGACAATAAGGTCTTAACGCGTTCTGATAAAAATCGTGGTAAATCGGATAACGTTCCAAGTGA
AGAAGTAGTCAAAAAGATGAAAAACTATTGGAGACAACTTCTAAACGCCAAGTTAATCACTCAACGTAAGTTTGATA
ATTTAACGAAAGCTGAACGTGGAGGTTTGAGTGAACTTGATAAAGCTGGTTTTATCAAACGCCAATTGGTTGAAACT
CGCCAAATCACTAAGCATGTGGCACAAATTTTGGATAGTCGCATGAATACTAAATACGATGAAAATGATAAACTTAT
TCGAGAGGTTAAAGTGATTACCTTAAAATCTAAATTAGTTTCTGACTTCCGAAAAGATTTCCAATTCTATAAAGTAC
GTGAGATTAACAATTACCATCATGCCCATGATGCGTATCTAAATGCCGTCGTTGGAACTGCTTTGATTAAGAAATAT
CCAAAACTTGAATCGGAGTTTGTCTATGGTGATTATAAAGTTTATGATGTTCGTAAAATGATTGCTAAGTCTGAGCA
AGAAATAGGCAAAGCAACCGCAAAATATTTCTTTTACTCTAATATCATGAACTTCTTCAAAACAGAAATTACACTTG
CAAATGGAGAGATTCGCAAACGCCCTCTAATCGAAACTAATGGGGAAACTGGAGAAATTGTCTGGGATAAAGGGCGA
GATTTTGCCACAGTGCGCAAAGTATTGTCCATGCCCCAAGTCAATATTGTCAAGAAAACAGAAGTACAGACAGGCGG
ATTCTCCAAGGAGTCAATTTTACCAAAAAGAAATTCGGACAAGCTTATTGCTCGTAAAAAAGACTGGGATCCAAAAA
AATATGGTGGTTTTGATAGTCCAACGGTAGCTTATTCAGTCCTAGTGGTTGCTAAGGTGGAAAAAGGGAAATCGAAG
AAGTTAAAATCCGTTAAAGAGTTACTAGGGATCACAATTATGGAAAGAAGTTCCTTTGAAAAAAATCCGATTGACTT
TTTAGAAGCTAAAGGATATAAGGAAGTTAAAAAAGACTTAATCATTAAACTACCTAAATATAGTCTTTTTGAGTTAG
AAAACGGTCGTAAACGGATGCTGGCTAGTGCCGGAGAATTACAAAAAGGAAATGAGCTGGCTCTGCCAAGCAAATAT
GTGAATTTTTTATATTTAGCTAGTCATTATGAAAAGTTGAAGGGTAGTCCAGAAGATAACGAACAAAAACAATTGTT
TGTGGAGCAGCATAAGCATTATTTAGATGAGATTATTGAGCAAATCAGTGAATTTTCTAAGCGTGTTATTTTAGCAG
ATGCCAATTTAGATAAAGTTCTTAGTGCATATAACAAACATAGAGACAAACCAATACGTGAACAAGCAGAAAATATT
ATTCATTTATTTACGTTGACGAATCTTGGAGCTCCCGCTGCTTTTAAATATTTTGATACAACAATTGATCGTAAACG
ATATACGTCTACAAAAGAAGTTTTAGATGCCACTCTTATCCATCAATCCATCACTGGTCTTTATGAAACACGCATTG
ATTTGAGTCAGCTAGGAGGTGACTGA
(SEQ ID NO: 9)
MDKKYSIGLDIGTNSVGWAVITDEYKVPSKKFKVLGNTDRHSIKKNLIGALLEDSGETAEATRLKRTARRRYTRRKN
RICYLQEIFSNEMAKVDDSFFHRLEESFLVEEDKKHERHPIFGNIVDEVAYHEKYPTIYHLRKKLVDSTDKADLRLI
YLALAHMIKFRGHFLIEGDLNPDNSDVDKLFIQLVQTYNQLFEENPINASGVDAKAILSARLSKSRRLENLIAQLPG
EKKNGLFGNLIALSLGLTPNFKSNFDLAEDAKLQLSKDTYDDDLDNLLAQIGDQYADLFLAAKNLSDAILLSDILRV
NTEITKAPLSASMIKRYDEHHQDLTLLKALVRQQLPEKYKEIFFDQSKNGYAGYIDGGASQEEFYKFIKPILEKMDG
TEELLVKLNREDLLRKQRTFDNGSIPHQIHLGELHAILRRQEDFYPFLKDNREKIEKILTFRIPYYVGPLARGNSRF
AWMTRKSEETITPWNFEEVVDKGASAQSFIERMTNFDKNLPNEKVLPKHSLLYEYFTVYNELTKVKYVTEGMRKPAF
LSGEQKKAIVDLLFKTNRKVTVKQLKEDYFKKIECFDSVEISGVEDRENASLGTYHDLLKIIKDKDELDNEENEDIL
EDIVLTLTLFEDREMIEERLKTYAHLFDDKVMKQLKRRRYTGWGRLSRKLINGIRDKQSGKTILDFLKSDGFANRNF
MQLIHDDSLTFKEDIQKAQVSGQGDSLHEHIANLAGSPAIKKGILQTVKVVDELVKVMGRHKPENIVIEMARENQTT
QKGQKNSRERMKRIEEGIKELGSQILKEHPVENTQLQNEKLYLYYLQNGRDMYVDQELDINRLSDYDVDHIVPQSFL
KDDSIDNKVLTRSDKNRGKSDNVPSEEVVKKMKNYWRQLLNAKLITQRKFDNLTKAERGGLSELDKAGFIKRQLVET
ROITKHVAQILDSRMNTKYDENDKLIREVKVITLKSKLVSDERKDFQFYKVREINNYHHAHDAYLNAVVGTALIKKY
PKLESEFVYGDYKVYDVRKMIAKSEQEIGKATAKYFFYSNIMNFFKTEITLANGEIRKRPLIETNGETGEIVWDKGR
DFATVRKVLSMPOVNIVKKTEVOTGGFSKESILPKRNSDKLIARKKDWDPKKYGGFDSPTVAYSVLVVAKVEKGKSK
KLKSVKELLGITIMERSSFEKNPIDFLEAKGYKEVKKDLIIKLPKYSLFELENGRKRMLASAGELQKGNELALPSKY
VNFLYLASHYEKLKGSPEDNEQKQLFVEQHKHYLDEIIEQISEFSKRVILADANLDKVLSAYNKHRDKPIREQAENI
IHLFTLTNLGAPAAFKYFDTTIDRKRYTSTKEVLDATLIHQSITGLYETRIDLSQLGGD
(single underline: HNH domain; double underline: RuvC domain)

[0100] In some embodiments, Cas9 refers to Cas9 from: Corynebacterium ulcerans (NCBI Refs: NC_015683.1, NC_017317.1); Corynebacterium diphtheria (NCBI Refs: NC_016782.1, NC_016786.1); Spiroplasma syrphidicola (NCBI Ref: NC_021284.1); Prevotella intermedia (NCBI Ref: NC_017861.1); Spiroplasma taiwanense (NCBI Ref: NC_021846.1); Streptococcus iniae (NCBI Ref: NC_021314.1); Belliella baltica (NCBI Ref: NC_018010.1); Psychroflexus torquisI (NCBI Ref: NC_018721.1); Streptococcus thermophilus (NCBI Ref: YP_820832.1); Listeria innocua (NCBI Ref: NP_472073.1); Campylobacter jejuni (NCBI Ref: YP_002344900.1); or Neisseria. meningitidis (NCBI Ref: YP_002342100.1) or to a Cas9 from any of the organisms listed in Example 3.

[0101] In some embodiments, dCas9 corresponds to, or comprises in part or in whole, a Cas9 amino acid sequence having one or more mutations that inactivate the Cas9 nuclease activity. For example, in some embodiments, a dCas9 domain comprises D10A and/or H840A mutation.

dCas9 (D10A and H840A):
(SEQ ID NO: 8)
MDKKYSIGLA*IGTNSVGWAVITDEYKVPSKKFKVLGNTDRHSIKKNLIGALLFDSGETAEATRLKRTARRRYTRRK
NRICYLQEIFSNEMAKVDDSFFHRLEESFLVEEDKKHERHPIFGNI*VDEVAYHEKYPTIYH*LRKKLVDSTDKADL
RLIYLALAHMIKFRGHFLIEGDLNPDNSDVD*KLFIQLVQTYNQLFEENPINASGVDAKAILSARLSKSRRLENLIA
QLPGEKKNGLFGNLIALSLGLTPNFKSNFDLAEDA*KLQLSKDTYDDDLDNLLAQIGDQYADLFLAAK*NLSDAILL
SDILRVNTEITKAPLSASMIKRYDEHHQDLTLLKALVRQQLPEKYKEIFFDQSKNGYAGYIDGGASQEEFYKFIKPI
LEKMDGTEELLVKLNREDLLRKORTFDNGS*IPHQIHLGELHAILRRQEDFYPFLKDNREKIEKILTFRIPYYVGPL
ARGNSRFAWMTRKSEETITPWNFEE*VVDKGASAQSFIERMTNFDKNLPNEKVLPKHSLLYEYFTVYNELTKVKYVT
EGMRKPAFLSGE*QKKAIVDLLFKTNRKVTVKOLKEDYFKKIECFDSVEISGVEDRENASLGTYHDLLKIIKDKDEL
DNEENEDILEDIVLTLTLFEDREMIEERLKTYAHLFDDKVMKQLKRRRYTGWG*RLSRKLINGIRDKQSGKTILDEL

[chemical structure]

[chemical structure]

[chemical structure]

[chemical structure]

[chemical structure]

[chemical structure]

VAKVEKGKSKKLKSVKELLGITIMERSSFEKNPIDFLEAKGYKEVKKDLIIKLPKYSLFELENGRKRMLASAGELQK
GNELALPSKYVNFLYLASHYEKLKGSPEDNEQKOLFVEQHKHYLDEIIEQISEFSKRVILADANLDKVLSAYNKHRD
KPIREQAENIIHLFTLTNLGAPAAFKYFDTTIDRKRYTSTKEVLDATLIHQSITGLYETRIDLSQLGGD
(single underline: HNH domain; double underline: RuvC domain)

[0102] In some embodiments, Cas9 corresponds to, or comprises in part or in whole, a Cas9 amino acid sequence having one or more mutations that alter Cas9's nuclease activity. In some embodiments, Cas9 may be a Cas9 nickase, which is a version of Cas9 that generates a single-stranded DNA break at a specific location based on a co-expressed gRNA-defined target sequence, rather than a double-strand DNA break. For example, in some embodiments, a Cas9 domain comprises D10A mutation (e.g., SEQ ID NO: 301) and/or an H840A mutation (e.g., SEQ ID NO: 302). Exemplary Cas9 nickases are shown below. However, it should be appreciated that additional Cas9 nickases that generate a single-stranded DNA break of a DNA duplex would be apparent to the skilled artisan and are within the scope of this disclosure.

Cas9 D10A nickase:
(SEQ ID NO: 301)
MDKKYSIGLAIGTNSVGWAVITDEYKVPSKKFKVLGNTDRHSIKKNLIGALLFDSGETAEATRLKRTARRRYTRRKN
RICYLQEIFSNEMAKVDDSFFHRLEESFLVEEDKKHERHPIFGNIVDEVAYHEKYPTIYHLRKKLVDSTDKADLRLI
YLALAHMIKFRGHFLIEGDLNPDNSDVDKLFIQLVQTYNQLFEENPINASGVDAKAILSARLSKSRRLENLIAQLPG
EKKNGLFGNLIALSLGLTPNFKSNFDLAEDAKLQLSKDTYDDDLDNLLAQIGDQYADLFLAAKNLSDAILLSDILRV
NTEITKAPLSASMIKRYDEHHQDLTLLKALVRQQLPEKYKEIFFDQSKNGYAGYIDGGASQEEFYKFIKPILEKMDG
TEELLVKLNREDLLRKQRTFDNGSIPHQIHLGELHAILRRQEDFYPFLKDNREKIEKILTFRIPYYVGPLARGNSRF
AWMTRKSEETITPWNFEEVVDKGASAQSFIERMTNFDKNLPNEKVLPKHSLLYEYFTVYNELTKVKYVTEGMRKPAF
LSGEQKKAIVDLLFKTNRKVTVKQLKEDYFKKIECFDSVEISGVEDRENASLGTYHDLLKIIKDKDELDNEENEDIL
EDIVLTLTLFEDREMIEERLKTYAHLFDDKVMKQLKRRRYTGWGRLSRKLINGIRDKQSGKTILDFLKSDGFANRNF
MQLIHDDSLTFKEDIQKAQVSGQGDSLHEHIANLAGSPAIKKGILOTVKVVDELVKVMGRHKPENIVIEMARENQTT
QKGQKNSRERMKRIEEGIKELGSQILKEHPVENTQLQNEKLYLYYLQNGRDMYVDQELDINRLSDYDVDHIVPQSFL
KDDSIDNKVLTRSDKNRGKSDNVPSEEVVKKMKNYWRQLLNAKLITQRKFDNLTKAERGGLSELDKAGFIKROLVET
RQITKHVAQILDSRMNTKYDENDKLIREVKVITLKSKLVSDFRKDFQFYKVREINNYHHAHDAYLNAVVGTALIKKY
PKLESEFVYGDYKVYDVRKMIAKSEQEIGKATAKYFFYSNIMNFFKTEITLANGEIRKRPLIETNGETGEIVWDKGR
DFATVRKVLSMPOVNIVKKTEVOTGGFSKESILPKRNSDKLIARKKDWDPKKYGGFDSPTVAYSVLVVAKVEKGKSK
KLKSVKELLGITIMERSSFEKNPIDFLEAKGYKEVKKDLIIKLPKYSLFELENGRKRMLASAGELQKGNELALPSKY
VNFLYLASHYEKLKGSPEDNEQKQLFVEQHKHYLDEIIEQISEFSKRVILADANLDKVLSAYNKHRDKPIREQAENI
IHLFTLTNLGAPAAFKYFDTTIDRKRYTSTKEVLDATLIHQSITGLYETRIDLSQLGGD
(single underline: HNH domain; double underline: RuvC domain)
Cas9 H840A nickase:
(SEQ ID NO: 302)
MDKKYSIGLDIGTNSVGWAVITDEYKVPSKKFKVLGNTDRHSIKKNLIGALLEDSGETAEATRLKRTARRRYTRRKN
RICYLQEIFSNEMAKVDDSFFHRLEESFLVEEDKKHERHPIFGNIVDEVAYHEKYPTIYHLRKKLVDSTDKADLRLI
YLALAHMIKFRGHFLIEGDLNPDNSDVDKLFIQLVQTYNQLFEENPINASGVDAKAILSARLSKSRRLENLIAQLPG
EKKNGLFGNLIALSLGLTPNFKSNFDLAEDAKLQLSKDTYDDDLDNLLAQIGDQYADLFLAAKNLSDAILLSDILRV
NTEITKAPLSASMIKRYDEHHQDLTLLKALVRQQLPEKYKEIFFDQSKNGYAGYIDGGASQEEFYKFIKPILEKMDG
TEELLVKLNREDLLRKQRTFDNGSIPHQIHLGELHAILRRQEDFYPFLKDNREKIEKILTFRIPYYVGPLARGNSRF
AWMTRKSEETITPWNFEEVVDKGASAQSFIERMTNFDKNLPNEKVLPKHSLLYEYFTVYNELTKVKYVTEGMRKPAF
LSGEQKKAIVDLLFKTNRKVTVKQLKEDYFKKIECFDSVEISGVEDRFNASLGTYHDLLKIIKDKDELDNEENEDIL
EDIVLTLTLFEDREMIEERLKTYAHLFDDKVMKQLKRRRYTGWGRLSRKLINGIRDKQSGKTILDFLKSDGFANRNE
MQLIHDDSLTFKEDIQKAQVSGQGDSLHEHIANLAGSPAIKKGILOTVKVVDELVKVMGRHKPENIVIEMARENQTT
QKGQKNSRERMKRIEEGIKELGSQILKEHPVENTQLQNEKLYLYYLQNGRDMYVDQELDINRLSDYDVDAIVPQSFL
KDDSIDNKVLTRSDKNRGKSDNVPSEEVVKKMKNYWRQLLNAKLITQRKFDNLTKAERGGLSELDKAGFIKRQLVET
RQITKHVAQILDSRMNTKYDENDKLIREVKVITLKSKLVSDERKDFQFYKVREINNYHHAHDAYLNAVVGTALIKKY
PKLESEFVYGDYKVYDVRKMIAKSEQEIGKATAKYFFYSNIMNFFKTEITLANGEIRKRPLIETNGETGEIVWDKGR
DFATVRKVLSMPOVNIVKKTEVOTGGFSKESILPKRNSDKLIARKKDWDPKKYGGEDSPTVAYSVLVVAKVEKGKSK
KLKSVKELLGITIMERSSFEKNPIDFLEAKGYKEVKKDLIIKLPKYSLFELENGRKRMLASAGELQKGNELALPSKY
VNFLYLASHYEKLKGSPEDNEQKQLFVEQHKHYLDEIIEQISEFSKRVILADANLDKVLSAYNKHRDKPIREQAENI
IHLFTLTNLGAPAAFKYFDTTIDRKRYTSTKEVLDATLIHQSITGLYETRIDLSQLGGD
(single underline: HNH domain; double underline: RuvC domain)

[0103] In other embodiments, dCas9 variants having mutations other than D10A and H840A are provided, which, e.g., result in nuclease-inactivated Cas9 (dCas9). Such mutations, by way of example, include other amino acid substitutions at D10 and H820, or other substitutions within the nuclease domains of Cas9 (e.g., substitutions in the HNH nuclease subdomain and/or the RuvC1 subdomain). In some embodiments, variants or homologues of dCas9 (e.g., variants of SEQ ID NO: 9) are provided which are at least about 70% identical, at least about 80% identical, at least about 90% identical, at least about 95% identical, at least about 98% identical, at least about 99% identical, at least about 99.5% identical, or at least about 99.9% identical to SEQ ID NO: 9. In some embodiments, variants of dCas9 (e.g., variants of SEQ ID NO: 9) are provided having amino acid sequences which are shorter, or longer than SEQ ID NO: 9, by about 5 amino acids, by about 10 amino acids, by about 15 amino acids, by about 20 amino acids, by about 25 amino acids, by about 30 amino acids, by about 40 amino acids, by about 50 amino acids, by about 75 amino acids, by about 100 amino acids, or more.

[0104] In some embodiments, Cas9 fusion proteins as provided herein comprise the full-length amino acid sequence of a Cas9 protein, e.g., one of the sequences provided above. In other embodiments, however, fusion proteins as provided herein do not comprise a full-length Cas9 sequence, but only a fragment thereof. For example, in some embodiments, a Cas9 fusion protein provided herein comprises a Cas9 fragment, wherein the fragment binds crRNA and tracrRNA or a sgRNA, but does not comprise a functional nuclease domain, e.g., it comprises only a truncated version of a nuclease domain or no nuclease domain at all. Exemplary amino acid sequences of suitable Cas9 domains and Cas9 fragments are provided herein, and additional suitable sequences of Cas9 domains and Cas9 fragments will be apparent to those of skill in the art. In some embodiments, a Cas9 fragment is at least 30%, at least 35%, at least 40%, at least 45%, at least 50%, at least 55%, at least 60%, at least 65%, at least 70%, at least 75%, at least 80%, at least 85%, at least 90%, at least 95% identical, at least 96%, at least 97%, at least 98%, at least 99%, or at least 99.5% of the amino acid length of a corresponding wild type Cas9 protein. In some embodiments, a Cas9 fragment comprises at least at least 100 amino acids in length. In some embodiments, the Cas9 fragment is at least 100, 150, 200, 250, 300, 350, 400, 450, 500, 550, 600, 650, 700, 750, 800, 850, 900, 950, 1000, 1050, 1100, 1150, 1200, 1250, 1300, 1350, 1400, 1450, 1500, 1550, or at least 1600 amino acids of a corresponding wild type Cas9 protein. In some embodiments, the Cas9 fragment comprises an amino acid sequence that has at least 10, at least 15, at least 20, at least 30, at least 40, at least 50, at least 60, at least 70, at least 80, at least 90, at least 100, at least 150, at least 200, at least 250, at least 300, at least 350, at least 400, at least 500, at least 600, at least 700, at least 800, at least 900, at least 1000, at least 1100, or at least 1200 identical contiguous amino acid residues of a corresponding wild type Cas9 protein.

[0105] Cas9. In some embodiments, Cas9 refers to Cas9 from: Corynebacterium ulcerans (NCBI Refs: NC_015683.1, NC_017317.1); Corynebacterium diphtheria (NCBI Refs: NC_016782.1, NC_016786.1); Spiroplasma syrphidicola (NCBI Ref: NC_021284.1); Prevotella intermedia (NCBI Ref: NC_017861.1); Spiroplasma taiwanense (NCBI Ref: NC_021846.1); Streptococcus iniae (NCBI Ref: NC_021314.1); Belliella baltica (NCBI Ref: NC_018010.1); Psychroflexus torquisI (NCBI Ref: NC_018721.1); Streptococcus thermophilus (NCBI Ref: YP_820832.1); Listeria innocua (NCBI Ref: NP_472073.1); Campylobacter jejuni (NCBI Ref: YP_002344900.1); or Neisseria. meningitidis (NCBI Ref: YP_002342100.1).

[0106] The term “deaminase” or “deaminase domain,” as used herein, refers to a protein or enzyme that catalyzes a deamination reaction. In some embodiments, the deaminase or deaminase domain is a cytidine deaminase, catalyzing the hydrolytic deamination of cytidine or deoxycytidine to uridine or deoxyuridine, respectively. In some embodiments, the deaminase or deaminase domain is a cytosine deaminase, catalyzing the hydrolytic deamination of cytosine to uracil. In some embodiments, the deaminase or deaminase domain is a naturally-occurring deaminase from an organism, such as a human, chimpanzee, gorilla, monkey, cow, dog, rat, or mouse. In some embodiments, the deaminase or deaminase domain is a variant of a naturally-occurring deaminase from an organism, that does not occur in nature. For example, in some embodiments, the deaminase or deaminase domain is at least 50%, at least 55%, at least 60%, at least 65%, at least 70%, at least 75% at least 80%, at least 85%, at least 90%, at least 95%, at least 96%, at least 97%, at least 98%, at least 99%, or at least 99.5% identical to a naturally-occurring deaminase from an organism.

[0107] The term “effective amount,” as used herein, refers to an amount of a biologically active agent that is sufficient to elicit a desired biological response. For example, in some embodiments, an effective amount of a nuclease may refer to the amount of the nuclease that is sufficient to induce cleavage of a target site specifically bound and cleaved by the nuclease. In some embodiments, an effective amount of a fusion protein provided herein, e.g., of a fusion protein comprising a nuclease-inactive Cas9 domain and a effector domain (e.g., a deaminase domain) may refer to the amount of the fusion protein that is sufficient to induce editing of a target site specifically bound and edited by the fusion protein. As will be appreciated by the skilled artisan, the effective amount of an agent, e.g., a fusion protein, a nuclease, a deaminase, a recombinase, a hybrid protein, a protein dimer, a complex of a protein (or protein dimer) and a polynucleotide, or a polynucleotide, may vary depending on various factors such as, for example, on the desired biological response, e.g., on the specific allele, genome, or target site to be edited; on the cell or tissue being targeted; and on the agent being used.

[0108] The term “immediately adjacent” as used in the context of two nucleic acid sequences refers to two sequences that directly abut each other as part of the same nucleic acid molecule and are not separated by one or more nucleotides. Accordingly, sequences are immediately adjacent, when the nucleotide at the 3′-end of one of the sequences is directly connected to nucleotide at the 5′-end of the other sequence via a phosphodiester bond.

[0109] The term “linker,” as used herein, refers to a chemical group or a molecule linking two molecules or moieties, e.g., two domains of a fusion protein, such as, for example, a nuclease-inactive Cas9 domain and a effector domain (e.g., a deaminase domain). In some embodiments, a linker joins a gRNA binding domain of an RNA-programmable nuclease, including a Cas9 nuclease domain, and the catalytic domain of a nucleic-acid editing protein. In some embodiments, a linker joins a dCas9 and a nucleic-acid editing protein. Typically, the linker is positioned between, or flanked by, two groups, molecules, or other moieties and connected to each one via a covalent bond, thus connecting the two. In some embodiments, the linker is an amino acid or a plurality of amino acids (e.g., a peptide or protein). In some embodiments, the linker is an organic molecule, group, polymer, or chemical moiety. In some embodiments, the linker is 5-100 amino acids in length, for example, 5, 6, 7, 8, 9, 10, 11, 12, 13, 14, 15, 16, 17, 18, 19, 20, 21, 22, 23, 24, 25, 26, 27, 28, 29, 30, 30-35, 35-40, 40-45, 45-50, 50-60, 60-70, 70-80, 80-90, 90-100, 100-150, or 150-200 amino acids in length. Longer or shorter linkers are also contemplated.

[0110] The term “mutation,” as used herein, refers to a substitution of a residue within a sequence, e.g., a nucleic acid or amino acid sequence, with another residue, or a deletion or insertion of one or more residues within a sequence. Mutations are typically described herein by identifying the original residue followed by the position of the residue within the sequence and by the identity of the newly substituted residue. Various methods for making the amino acid substitutions (mutations) provided herein are well known in the art, and are provided by, for example, Green and Sambrook, Molecular Cloning: A Laboratory Manual (4^{th} ed., Cold Spring Harbor Laboratory Press, Cold Spring Harbor, N.Y. (2012)).

[0111] The terms “nucleic acid” and “nucleic acid molecule,” as used herein, refer to a compound comprising a nucleobase and an acidic moiety, e.g., a nucleoside, a nucleotide, or a polymer of nucleotides. Typically, polymeric nucleic acids, e.g., nucleic acid molecules comprising three or more nucleotides are linear molecules, in which adjacent nucleotides are linked to each other via a phosphodiester linkage. In some embodiments, “nucleic acid” refers to individual nucleic acid residues (e.g. nucleotides and/or nucleosides). In some embodiments, “nucleic acid” refers to an oligonucleotide chain comprising three or more individual nucleotide residues. As used herein, the terms “oligonucleotide” and “polynucleotide” can be used interchangeably to refer to a polymer of nucleotides (e.g., a string of at least three nucleotides). In some embodiments, “nucleic acid” encompasses RNA as well as single and/or double-stranded DNA. Nucleic acids may be naturally occurring, for example, in the context of a genome, a transcript, mRNA, tRNA, rRNA, siRNA, snRNA, a plasmid, cosmid, chromosome, chromatid, or other naturally occurring nucleic acid molecule. On the other hand, a nucleic acid molecule may be a non-naturally occurring molecule, e.g., a recombinant DNA or RNA, an artificial chromosome, an engineered genome, or fragment thereof, or a synthetic DNA, RNA, DNA/RNA hybrid, or including non-naturally occurring nucleotides or nucleosides. Furthermore, the terms “nucleic acid,” “DNA,” “RNA,” and/or similar terms include nucleic acid analogs, e.g., analogs having other than a phosphodiester backbone. Nucleic acids can be purified from natural sources, produced using recombinant expression systems and optionally purified, chemically synthesized, etc. Where appropriate, e.g., in the case of chemically synthesized molecules, nucleic acids can comprise nucleoside analogs such as analogs having chemically modified bases or sugars, and backbone modifications. A nucleic acid sequence is presented in the 5′ to 3′ direction unless otherwise indicated. In some embodiments, a nucleic acid is or comprises natural nucleosides (e.g. adenosine, thymidine, guanosine, cytidine, uridine, deoxyadenosine, deoxythymidine, deoxyguanosine, and deoxycytidine); nucleoside analogs (e.g., 2-aminoadenosine, 2-thiothymidine, inosine, pyrrolo-pyrimidine, 3-methyl adenosine, 5-methylcytidine, 2-aminoadenosine, C5-bromouridine, C5-fluorouridine, C5-iodouridine, C5-propynyl-uridine, C5-propynyl-cytidine, C5-methylcytidine, 2-aminoadenosine, 7-deazaadenosine, 7-deazaguanosine, 8-oxoadenosine, 8-oxoguanosine, O (6)-methylguanine, and 2-thiocytidine); chemically modified bases; biologically modified bases (e.g., methylated bases); intercalated bases; modified sugars (e.g., 2′-fluororibose, ribose, 2′-deoxyribose, arabinose, and hexose); and/or modified phosphate groups (e.g., phosphorothioates and 5′-N-phosphoramidite linkages). In some embodiments, an RNA is an RNA associated with the Cas9 system. For example, the RNA may be a CRISPR RNA (crRNA), a trans-encoded small RNA (tracrRNA), a single guide RNA (sgRNA), or a guide RNA (gRNA).

[0112] The term “proliferative disease,” as used herein, refers to any disease in which cell or tissue homeostasis is disturbed in that a cell or cell population exhibits an abnormally elevated proliferation rate. Proliferative diseases include hyperproliferative diseases, such as pre-neoplastic hyperplastic conditions and neoplastic diseases. Neoplastic diseases are characterized by an abnormal proliferation of cells and include both benign and malignant neoplasias. Malignant neoplasia is also referred to as cancer.

[0113] The terms “protein,” “peptide,” and “polypeptide” are used interchangeably herein, and refer to a polymer of amino acid residues linked together by peptide (amide) bonds. The terms refer to a protein, peptide, or polypeptide of any size, structure, or function. Typically, a protein, peptide, or polypeptide will be at least three amino acids long. A protein, peptide, or polypeptide may refer to an individual protein or a collection of proteins. One or more of the amino acids in a protein, peptide, or polypeptide may be modified, for example, by the addition of a chemical entity such as a carbohydrate group, a hydroxyl group, a phosphate group, a farnesyl group, an isofarnesyl group, a fatty acid group, a linker for conjugation, functionalization, or other modification, etc. A protein, peptide, or polypeptide may also be a single molecule or may be a multi-molecular complex. A protein, peptide, or polypeptide may be just a fragment of a naturally occurring protein or peptide. A protein, peptide, or polypeptide may be naturally occurring, recombinant, or synthetic, or any combination thereof. The term “fusion protein” as used herein refers to a hybrid polypeptide which comprises protein domains from at least two different proteins. One protein may be located at the amino-terminal (N-terminal) portion of the fusion protein or at the carboxy-terminal (C-terminal) protein thus forming an “amino-terminal fusion protein” or a “carboxy-terminal fusion protein,” respectively. A protein may comprise different domains, for example, a nucleic acid binding domain (e.g., the gRNA binding domain of Cas9 that directs the binding of the protein to a target site) and a nucleic acid cleavage domain or a catalytic domain of a nucleic-acid editing protein. In some embodiments, a protein comprises a proteinaceous part, e.g., an amino acid sequence constituting a nucleic acid binding domain, and an organic compound, e.g., a compound that can act as a nucleic acid cleavage agent. In some embodiments, a protein is in a complex with, or is in association with, a nucleic acid, e.g., RNA. Any of the proteins provided herein may be produced by any method known in the art. For example, the proteins provided herein may be produced via recombinant protein expression and purification, which is especially suited for fusion proteins comprising a peptide linker. Methods for recombinant protein expression and purification are well known, and include those described by Green and Sambrook, Molecular Cloning: A Laboratory Manual (4^{th} ed., Cold Spring Harbor Laboratory Press, Cold Spring Harbor, N.Y. (2012)), the entire contents of which are incorporated herein by reference.

[0114] The term “RNA-programmable nuclease,” and “RNA-guided nuclease” are used interchangeably herein and refer to a nuclease that forms a complex with (e.g., binds or associates with) one or more RNA that is not a target for cleavage. In some embodiments, an RNA-programmable nuclease, when in a complex with an RNA, may be referred to as a nuclease: RNA complex. Typically, the bound RNA(s) is referred to as a guide RNA (gRNA). gRNAs can exist as a complex of two or more RNAs, or as a single RNA molecule. gRNAs that exist as a single RNA molecule may be referred to as single-guide RNAs (sgRNAs), though “gRNA” is used interchangeably to refer to guide RNAs that exist as either single molecules or as a complex of two or more molecules. Typically, gRNAs that exist as single RNA species comprise two domains: (1) a domain that shares homology to a target nucleic acid (e.g., and directs binding of a Cas9 complex to the target); and (2) a domain that binds a Cas9 protein. In some embodiments, domain (2) corresponds to a sequence known as a tracrRNA, and comprises a stem-loop structure. For example, in some embodiments, domain (2) is identical or homologous to a tracrRNA as provided in Jinek et al., Science 337:816-821 (2012), the entire contents of which is incorporated herein by reference. Other examples of gRNAs (e.g., those including domain 2) can be found in U.S. Provisional Patent Application, U.S. Ser. No. 61/874,682, filed Sep. 6, 2013, entitled “Switchable Cas9 Nucleases and Uses Thereof,” and U.S. Provisional Patent Application, U.S. Ser. No. 61/874,746, filed Sep. 6, 2013, entitled “Delivery System For Functional Nucleases,” the entire contents of each are hereby incorporated by reference in their entirety. In some embodiments, a gRNA comprises two or more of domains (1) and (2), and may be referred to as an “extended gRNA.” For example, an extended gRNA will, e.g., bind two or more Cas9 proteins and bind a target nucleic acid at two or more distinct regions, as described herein. The gRNA comprises a nucleotide sequence that complements a target site, which mediates binding of the nuclease/RNA complex to said target site, providing the sequence specificity of the nuclease: RNA complex. In some embodiments, the RNA-programmable nuclease is the (CRISPR-associated system) Cas9 endonuclease, for example Cas9 (Csn1) from Streptococcus pyogenes (see, e.g., “Complete genome sequence of an MI strain of Streptococcus pyogenes.” Ferretti J. J., McShan W. M., Ajdic D. J., Savic D. J., Savic G., Lyon K., Primeaux C., Sezate S., Suvorov A. N., Kenton S., Lai H. S., Lin S. P., Qian Y., Jia H. G., Najar F. Z., Ren Q., Zhu H., Song L., White J., Yuan X., Clifton S. W., Roc B. A., Mclaughlin R. E., Proc. Natl. Acad. Sci. U.S.A. 98:4658-4663 (2001); “CRISPR RNA maturation by trans-encoded small RNA and host factor RNase III.” Deltcheva E., Chylinski K., Sharma C. M., Gonzales K., Chao Y., Pirzada Z. A., Eckert M. R., Vogel J., Charpentier E., Nature 471:602-607 (2011); and “A programmable dual-RNA-guided DNA endonuclease in adaptive bacterial immunity.” Jinek M., Chylinski K., Fonfara I., Hauer M., Doudna J. A., Charpentier E. Science 337:816-821 (2012), the entire contents of each of which are incorporated herein by reference.

[0115] Because RNA-programmable nucleases (e.g., Cas9) use RNA:DNA hybridization to target DNA cleavage sites, these proteins are able to be targeted, in principle, to any sequence specified by the guide RNA. Methods of using RNA-programmable nucleases, such as Cas9, for site-specific cleavage (e.g., to modify a genome) are known in the art (see e.g., Cong, L. et al. Multiplex genome engineering using CRISPR/Cas systems. Science 339, 819-823 (2013); Mali, P. et al. RNA-guided human genome engineering via Cas9. Science 339, 823-826 (2013); Hwang, W. Y. et al. Efficient genome editing in zebrafish using a CRISPR-Cas system. Nature biotechnology 31, 227-229 (2013); Jinek, M. et al. RNA-programmed genome editing in human cells. eLife 2, c00471 (2013); Dicarlo, J. E. et al. Genome engineering in Saccharomyces cerevisiae using CRISPR-Cas systems. Nucleic acids research (2013); Jiang, W. et al. RNA-guided editing of bacterial genomes using CRISPR-Cas systems. Nature biotechnology 31, 233-239 (2013); the entire contents of each of which are incorporated herein by reference).

[0116] The term “subject,” as used herein, refers to an individual organism, for example, an individual mammal. In some embodiments, the subject is a human. In some embodiments, the subject is a non-human mammal. In some embodiments, the subject is a non-human primate. In some embodiments, the subject is a rodent. In some embodiments, the subject is a sheep, a goat, a cattle, a cat, or a dog. In some embodiments, the subject is a vertebrate, an amphibian, a reptile, a fish, an insect, a fly, or a nematode. In some embodiments, the subject is a research animal. In some embodiments, the subject is genetically engineered, e.g., a genetically engineered non-human subject. The subject may be of either sex, of any age, and at any stage of development.

[0117] The term “target site” refers to a sequence within a nucleic acid molecule that is deaminated by a deaminase or a fusion protein comprising a deaminase (e.g., a dCas9-deaminase fusion protein provided herein).

[0118] The terms “treatment,” “treat,” and “treating,” refer to a clinical intervention aimed to reverse, alleviate, delay the onset of, or inhibit the progress of a disease or disorder, or one or more symptoms thereof, as described herein. As used herein, the terms “treatment,” “treat,” and “treating” refer to a clinical intervention aimed to reverse, alleviate, delay the onset of, or inhibit the progress of a disease or disorder, or one or more symptoms thereof, as described herein. In some embodiments, treatment may be administered after one or more symptoms have developed and/or after a disease has been diagnosed. In other embodiments, treatment may be administered in the absence of symptoms, e.g., to prevent or delay onset of a symptom or inhibit onset or progression of a disease. For example, treatment may be administered to a susceptible individual prior to the onset of symptoms (e.g., in light of a history of symptoms and/or in light of genetic or other susceptibility factors). Treatment may also be continued after symptoms have resolved, for example, to prevent or delay their recurrence.

[0119] The term “recombinant” as used herein in the context of proteins or nucleic acids refers to proteins or nucleic acids that do not occur in nature, but are the product of human engineering. For example, in some embodiments, a recombinant protein or nucleic acid molecule comprises an amino acid or nucleotide sequence that comprises at least one, at least two, at least three, at least four, at least five, at least six, or at least seven mutations as compared to any naturally occurring sequence.

[0120] The term “nucleic acid editing enzyme” as used herein refers to proteins that are able to modify a nucleic acids or one or more nucleotide bases of a nucleic acid. For example, in some embodiments, a nucleic acid editing enzyme is a deaminase, which can catalyze C to T or G to A changes. Other suitable nucleic acid editing enzyme that may be used in accordance with this disclosure include, without limitation, a nuclease, nickase, recombinase, deaminase, methyltransferase, methylase, acetylase, or acetyltransferase.

### DETAILED DESCRIPTION OF CERTAIN EMBODIMENTS OF THE INVENTION

[0121] Some aspects of this disclosure provide recombinant Cas9 proteins that efficiently target DNA sequences that do not comprise the canonical PAM sequence (5′-NGG-3′, where N is any nucleotide, for example A, T, G, or C) at their 3′-ends. In some embodiments, the Cas9 proteins provided herein comprise one or more mutations identified in directed evolution experiments using a target sequence library comprising randomized PAM sequences. The recombinant non-PAM restricted Cas9 proteins provided herein are useful for targeting DNA sequences that do not comprise the canonical PAM sequence at their 3′-end and thus greatly extend the usefulness of Cas9 technology for gene editing.

[0122] Some aspects of this disclosure provide fusion proteins that comprise a Cas9 protein and an effector domain, for example, a DNA-editing domain, such as, e.g., a deaminase domain. The deamination of a nucleobase by a deaminase can lead to a point mutation at the specific residue, which is referred to herein as nucleic acid editing. Fusion proteins comprising a Cas9 protein or variant thereof and a DNA-editing domain can thus be used for the targeted editing of nucleic acid sequences. Such fusion proteins are useful for targeted editing of DNA in vitro, e.g., for the generation of mutant cells or animals; for the introduction of targeted mutations, e.g., for the correction of genetic defects in cells ex vivo, e.g., in cells obtained from a subject that are subsequently re-introduced into the same or another subject; and for the introduction of targeted mutations, e.g., the correction of genetic defects or the introduction of deactivating mutations in disease-associated genes in a subject in vivo. Typically, the Cas9 protein of the fusion proteins described herein does not have any nuclease activity but instead is a Cas9 fragment or a dCas9 protein. Methods for the use of Cas9 fusion proteins as described herein are also provided.

[0123] Non-limiting, exemplary nuclease-inactive Cas9 proteins are provided herein. One exemplary suitable nuclease-inactive Cas9 protein is the D10A/H840A Cas9 protein mutant:

MDKKYSIGLAIGTNSVGWAVITDEYKVPSKKFKVLGNTDRHSIKKNLIGALLFDSGETAEATRLKRTARRRYTRRKN
RICYLQEIFSNEMAKVDDSFFHRLEESFLVEEDKKHERHPIFGNIVDEVAYHEKYPTIYHLRKKLVDSTDKADLRLI
YLALAHMIKFRGHFLIEGDLNPDNSDVDKLFIQLVQTYNQLFEENPINASGVDAKAILSARLSKSRRLENLIAQLPG
EKKNGLFGNLIALSLGLTPNFKSNFDLAEDAKLQLSKDTYDDDLDNLLAQIGDQYADLFLAAKNLSDAILLSDILRV
NTEITKAPLSASMIKRYDEHHQDLTLLKALVRQQLPEKYKEIFFDQSKNGYAGYIDGGASQEEFYKFIKPILEKMDG
TEELLVKLNREDLLRKQRTEDNGSIPHQIHLGELHAILRRQEDFYPFLKDNREKIEKILTFRIPYYVGPLARGNSRF
AWMTRKSEETITPWNFEEVVDKGASAQSFIERMTNFDKNLPNEKVLPKHSLLYEYFTVYNELTKVKYVTEGMRKPAF
LSGEQKKAIVDLLFKTNRKVTVKQLKEDYFKKIECFDSVEISGVEDRENASLGTYHDLLKIIKDKDELDNEENEDIL
EDIVLTLTLFEDREMIEERLKTYAHLFDDKVMKQLKRRRYTGWGRLSRKLINGIRDKQSGKTILDFLKSDGFANRNE
MQLIHDDSLTFKEDIQKAQVSGQGDSLHEHIANLAGSPAIKKGILQTVKVVDELVKVMGRHKPENIVIEMARENQTT
QKGQKNSRERMKRIEEGIKELGSQILKEHPVENTQLQNEKLYLYYLQNGRDMYVDQELDINRLSDYDVDAIVPQSFL
KDDSIDNKVLTRSDKNRGKSDNVPSEEVVKKMKNYWRQLLNAKLITQRKEDNLTKAERGGLSELDKAGFIKRQLVET
RQITKHVAQILDSRMNTKYDENDKLIREVKVITLKSKLVSDFRKDFQFYKVREINNYHHAHDAYLNAVVGTALIKKY
PKLESEFVYGDYKVYDVRKMIAKSEQEIGKATAKYFFYSNIMNFFKTEITLANGEIRKRPLIEINGETGEIVWDKGR
DFATVRKVLSMPQVNIVKKTEVQTGGFSKESILPKRNSDKLIARKKDWDPKKYGGFDSPTVAYSVLVVAKVEKGKSK
KLKSVKELLGITIMERSSFEKNPIDFLEAKGYKEVKKDLIIKLPKYSLFELENGRKRMLASAGELQKGNELALPSKY
VNFLYLASHYEKLKGSPEDNEQKQLFVEQHKHYLDEIIEQISEFSKRVILADANLDKVLSAYNKHRDKPIREQAENI
IHLFTLTNLGAPAAFKYFDTTIDRKRYTSTKEVLDATLIHQSITGLYETRIDLSQLGGD
(SEQ ID NO: 262; see, e.g., Qi et al., Repurposing CRISPR as an RNA-guided
platform for sequence-specific control of gene expression.
Cell. 2013; 152(5): 1173-83, the entire contents of which are incorporated
herein by reference).

[0124] Additional suitable nuclease-inactive Cas9 proteins will be apparent to those of skill in the art based on this disclosure. Such additional exemplary suitable nuclease-inactive Cas9 proteins include, but are not limited to, D10A, D839A, H840A, N863A, D10A/D839A, D10A/H840A, D10A/N863A, D839A/H840A, D839A/N863A, D10A/D839A/H840A, and D10A/D839A/H840A/N863A mutant proteins (See, e.g., Prashant et al., CAS9 transcriptional activators for target specificity screening and paired nickases for cooperative genome engineering. Nature Biotechnology. 2013; 31 (9): 833-838, the entire contents of which are incorporated herein by reference).

### Recombinant Cas9 Proteins

[0125] Some aspects of this disclosure provide recombinant Cas9 proteins comprising an amino acid sequence that is at least 80%, at least 85%, at least 90%, at least 92%, at least 95%, at least 96%, at least 97%, at least 98%, at least 99%, or at least 99.5% identical to the amino acid sequence of Cas9 as provided by any of the sequences provided in SEQ ID NOs: 10-262, wherein the Cas9 protein comprises a RuvC and an HNH domain, wherein the amino acid sequence of the Cas9 protein comprises at least one, at least two, at least three, at least four, at least five, at least six, or at least seven mutations at an amino acid residue selected from the group consisting of amino acid residues 122, 137, 182, 262, 294, 409, 480, 543, 660, 694, 1219, and 1329 of the amino acid sequence provided in SEQ ID NO: 9, or in a corresponding amino acid residue in any of the amino acid sequences provided in SEQ ID NOs: 10-262, and wherein the amino acid sequence of the recombinant Cas9 protein is not identical to the amino acid sequence of a naturally occurring Cas9 protein.

[0126] In some embodiments, the amino acid sequence of the Cas9 protein comprises at least one, at least two, at least three, at least four, at least five, at least six, or at least seven mutations selected from the group consisting of X262T, X294R, X409I, X480K, X543D, X694I, and X1219V of the amino acid sequence provided in SEQ ID NO: 9, or a corresponding mutation in any of the amino acid sequences provided in SEQ ID NOs: 10-262, wherein X represents any amino acid at the corresponding position.

[0127] In some embodiments, the amino acid sequence of the Cas9 protein comprises at least one, at least two, at least three, at least four, at least five, at least six, or at least seven mutations selected from the group consisting of A262T, K294R, S409I, E480K, E543D, M694I, or E1219V of the amino acid sequence provided in SEQ ID NO: 9, or a corresponding mutation in any of the amino acid sequences provided in SEQ ID NOs: 10-262. In some embodiments, the amino acid sequence of the Cas9 protein comprises an X1219V mutation of the amino acid sequence provided in SEQ ID NO: 9, or a corresponding mutation in any of the amino acid sequences provided in SEQ ID NOs: 10-262. In some embodiments, the amino acid sequence of the Cas9 protein comprises an E1219V mutation of the amino acid sequence provided in SEQ ID NO: 9, or a corresponding mutation in any of the amino acid sequences provided in SEQ ID NOs: 10-262.

[0128] In some embodiments, the amino acid sequence of the HNH domain is at least 80%, at least 85%, at least 90%, at least 92%, at least 95%, at least 96%, at least 97%, at least 98%, at least 99%, or at least 99.5% identical to the amino acid sequence of the HNH domain of SEQ ID NO: 9. In some embodiments, the amino acid sequence of the RuvC domain is at least 80%, at least 85%, at least 90%, at least 92%, at least 95%, at least 96%, at least 97%, at least 98%, at least 99%, or at least 99.5% identical to the amino acid sequence of the RuvC domain of any of SEQ ID NOs: 10-262. In some embodiments, the amino acid sequence of the RuvC domain is at least 80%, at least 85%, at least 90%, at least 92%, at least 95%, at least 96%, at least 97%, at least 98%, at least 99%, or at least 99.5% identical to the amino acid sequence of the RuvC domain of SEQ ID NO: 9. In some embodiments, the Cas9 protein comprises a D10A and/or a H840A mutation of the amino acid sequence provided in SEQ ID NO: 9, or a corresponding mutation in any of the amino acid sequences provided in SEQ ID NOs: 10-262.

Recombinant Cas9 Proteins with Activity on Non-Canonical PAMs

[0129] Some aspects of this disclosure provide recombinant Cas9 proteins comprising an amino acid sequence that is at least 90% identical to the amino acid sequence of Streptococcus pyogenes Cas9 as provided by SEQ ID NO: 9, comprising the RuvC and HNH domains of SEQ ID NO: 9, wherein the amino acid sequence of the Cas9 protein comprises at least one, at least two, at least three, at least four, at least five, at least six, or at least seven mutations in an amino acid residue selected from the group consisting of amino acid residues 122, 137, 182, 262, 294, 409, 480, 543, 660, 694, 1219, and 1329 of the amino acid sequence provided in SEQ ID NO: 9, wherein the amino acid sequence of the recombinant Cas9 protein is not identical to the amino acid sequence of a naturally occurring Cas9 protein, and wherein the recombinant Cas9 protein exhibits activity (e.g., increased activity) on a target sequence that does not comprise the canonical PAM (5′-NGG-3′) at its 3′-end as compared to Streptococcus pyogenes Cas9 as provided by SEQ ID NO: 9.

[0130] In some embodiments, the Cas9 protein exhibits activity on a target sequence having a 3′-end that is not directly adjacent to the canonical PAM sequence (5′-NGG-3′) that is at least 2-fold, at least 3-fold, at least 5-fold, at least 10-fold, at least 50-fold, at least 100-fold, at least 500-fold, at least 1,000-fold, at least 5,000-fold, at least 10,000-fold, at least 50,000-fold, at least 100,000-fold, at least 500,000-fold, or at least 1,000,000-fold increased as compared to the activity of Streptococcus pyogenes Cas9 as provided by SEQ ID NO: 9 on the same target sequence. In some embodiments, the 3′-end of the target sequence is directly adjacent to an AGC, GAG, TTT, GTG, or CAA sequence. In some embodiments, the Cas9 protein activity is measured by a nuclease assay, a deamination assay, or a transcriptional activation assay. In some embodiments, the transcriptional activation assay is a reporter activation assay, such as a GFP activation assay. Exemplary methods for measuring binding activity (e.g., of Cas9) using transcriptional activation assays are known in the art and would be apparent to the skilled artisan. For example, methods for measuring Cas9 activity using the tripartite activator VPR have been described in Chavez A., et al., “Highly efficient Cas9-mediated transcriptional programming.” Nature Methods 12, 326-328 (2015); the entire contents of which are incorporated by reference herein.

[0131] In some embodiments, the amino acid sequence of the Cas9 protein comprises at least one, at least two, at least three, at least four, at least five, at least six, or at least seven mutations selected from the group consisting of X262T, X294R, X409I, X480K, X543D, X694I, and X1219V of the amino acid sequence provided in SEQ ID NO: 9, or a corresponding mutation in any of the amino acid sequences provided in SEQ ID NOs: 10-262, wherein X represents any amino acid at the corresponding position.

[0132] In some embodiments, the amino acid sequence of the Cas9 protein comprises at least one, at least two, at least three, at least four, at least five, at least six, or at least seven mutations selected from the group consisting of A262T, K294R, S409I, E480K, E543D, M694I, or E1219V of the amino acid sequence provided in SEQ ID NO: 9, or a corresponding mutation in any of the amino acid sequences provided in SEQ ID NOs: 10-262. In some embodiments, the amino acid sequence of the Cas9 protein comprises an X1219V mutation of the amino acid sequence provided in SEQ ID NO: 9, or a corresponding mutation in any of the amino acid sequences provided in SEQ ID NOs: 10-262. In some embodiments, the amino acid sequence of the Cas9 comprises an X1219V mutation of the amino acid sequence provided in SEQ ID NO: 9, or a corresponding mutation in any of the amino acid sequences provided in SEQ ID NOs: 10-262.

[0133] In some embodiments, the amino acid sequence of the HNH domain is at least 80%, at least 85%, at least 90%, at least 92%, at least 95%, at least 96%, at least 97%, at least 98%, at least 99%, or at least 99.5% identical to the amino acid sequence of the HNH domain of any of SEQ ID NOs: 2, 4, or 9. In some embodiments, the amino acid sequence of the RuvC domain is at least 80%, at least 85%, at least 90%, at least 92%, at least 95%, at least 96%, at least 97%, at least 98%, at least 99%, or at least 99.5% identical to the amino acid sequence of the RuvC domain of any of SEQ ID NOs: 10-262. In some embodiments, the Cas9 protein comprises a D10A and/or a H840A mutation of the amino acid sequence provided in SEQ ID NO: 9, or a corresponding mutation in any of the amino acid sequences provided in SEQ ID NOs: 10-262.

[0134] Some aspects of this disclosure provide recombinant Cas9 proteins comprising an amino acid sequence that is at least 90% identical to the amino acid sequence of Streptococcus pyogenes Cas9 as provided by SEQ ID NO: 9, comprising the RuvC and HNH domains of SEQ ID NO: 9, wherein the amino acid sequence of the Cas9 protein comprises at least one, at least two, at least three, at least four, at least five, at least six, or at least seven mutations in an amino acid residue selected from the group consisting of amino acid residues 122, 137, 182, 262, 294, 409, 480, 543, 660, 694, 1219, and 1329 of the amino acid sequence provided in SEQ ID NO: 9, wherein the amino acid sequence of the recombinant Cas9 protein is not identical to the amino acid sequence of a naturally occurring Cas9 protein, and wherein the recombinant Cas9 protein exhibits an increased activity on a target sequence that does not comprise the canonical PAM (5′-NGG-3′) at its 3′-end as compared to Streptococcus pyogenes Cas9 as provided by SEQ ID NO: 9. In some embodiments, the amino acid sequence of the RuvC domain is at least 80%, at least 85%, at least 90%, at least 92%, at least 95%, at least 96%, at least 97%, at least 98%, at least 99%, or at least 99.5% identical to the amino acid sequence of the RuvC domain of any of SEQ ID NOs: 2, 4, or 9. In some embodiments, the Cas9 protein comprises a D10A and a H840A mutation of the amino acid sequence provided in SEQ ID NO: 9, or a corresponding mutation in any of the amino acid sequences provided in SEQ ID NOs: 10-262.

[0135] Some aspects of this disclosure provide recombinant Cas9 proteins comprising an amino acid sequence that is at least 90% identical to the amino acid sequence of Streptococcus pyogenes Cas9 as provided by SEQ ID NO: 9, comprising the RuvC and HNH domains of SEQ ID NO: 9, wherein the amino acid sequence of the Cas9 protein comprises at least one, at least two, at least three, at least four, at least five, at least six, or at least seven mutations in an amino acid residue selected from the group consisting of amino acid residues 122, 137, 182, 262, 294, 409, 480, 543, 660, 694, 1219, and 1329 of the amino acid sequence provided in SEQ ID NO: 9, wherein the amino acid sequence of the recombinant Cas9 protein is not identical to the amino acid sequence of a naturally occurring Cas9 protein, and wherein the recombinant Cas9 protein exhibits an increased activity on a target sequence that does not comprise the canonical PAM (5′-NGG-3′) at its 3′-end as compared to Streptococcus pyogenes Cas9 as provided by SEQ ID NO: 9. In some embodiments, the amino acid sequence of the RuvC domain is at least 80%, at least 85%, at least 90%, at least 92%, at least 95%, at least 96%, at least 97%, at least 98%, at least 99%, or at least 99.5% identical to the amino acid sequence of the RuvC domain of any of SEQ ID NOs: 2, 4, or 9. In some embodiments, the Cas9 protein comprises a D10A mutation of the amino acid sequence provided in SEQ ID NO: 9, or a corresponding mutation in any of the amino acid sequences provided in SEQ ID NOs: 10-262. In some embodiments, the Cas9 further comprises a histidine residue at position 840 as provided in SEQ ID NO: 9, or a corresponding histidine residue in any of the amino acid sequences provided in SEQ ID NOs: 10-262. Without wishing to be bound by any particular theory, the presence of the catalytic residue H840 allows Cas9 to cleave the non-targeted strand, i.e., the strand bound by the sgRNA. In some embodiments, a Cas9 having an amino acid residue other than histidine at position 840 of the amino acid sequence provided in SEQ ID NO: 9, or a corresponding amino acid sequence provided in SEQ ID NOs: 10-262 may be changed or reverted such that amino acid residue 840 of the amino acid sequence provided in SEQ ID NO: 9, or a corresponding amino acid sequence provided in SEQ ID NOs: 10-262 is histidine.

[0136] Some aspects of this disclosure provide recombinant Cas9 proteins comprising an amino acid sequence that is at least 90% identical to the amino acid sequence of Streptococcus pyogenes Cas9 as provided by SEQ ID NO: 9, comprising the RuvC and HNH domains of SEQ ID NO: 9; wherein the amino acid sequence of the Cas9 protein comprises at least one, at least two, at least three, at least four, at least five, at least six, or at least seven mutations in an amino acid residue selected from the group consisting of amino acid residues 262, 267, 294, 405, 409, 480, 543, 694, 1219, 1224, and 1256 of the amino acid sequence provided in SEQ ID NO: 9; wherein the amino acid sequence of the recombinant Cas9 protein is not identical to the amino acid sequence of a naturally occurring Cas9 protein; and wherein the recombinant Cas9 protein exhibits activity (e.g., increased activity) on a target sequence that does not comprise the canonical PAM (5′-NGG-3′) at its 3′-end as compared to Streptococcus pyogenes Cas9 as provided by SEQ ID NO: 9.

[0137] In some embodiments, the Cas9 protein exhibits an activity on a target sequence having a 3′-end that is not directly adjacent to the canonical PAM sequence (5′-NGG-3′) that is at least 2-fold, at least 3-fold, at least 5-fold, at least 10-fold, at least 50-fold, at least 100-fold, at least 500-fold, at least 1,000-fold, at least 5,000-fold, at least 10,000-fold, at least 50,000-fold, at least 100,000-fold, at least 500,000-fold, or at least 1,000,000-fold increased as compared to the activity of Streptococcus pyogenes Cas9 as provided by SEQ ID NO: 9 on the same target sequence. In some embodiments, the 3′-end of the target sequence is directly adjacent to an AAA, AAC, AAG, AAT, CAA, CAC, CAG, CAT, GAA, GAC, GAG, GAT, TAA, TAC, TAG, TAT, ACA, ACC, ACG, ACT, CCA, CCC, CCG, CCT, GCA, GCC, GCG, GCT, TCA, TCC, TCG, TCT, AGA, AGC, AGT, CGA, CGC, CGT, GGA, GGC, GGT, TGA, TGC, TGT, ATA, ATC, ATG, ATT, CTA, CTC, CTG, CTT, GTA, GTC, GTG, GTT, TTA, TTC, TTG, or TTT PAM sequence.

[0138] In some embodiments, the amino acid sequence of the Cas9 protein comprises at least one, at least two, at least three, at least four, at least five, at least six, or at least seven mutations selected from the group consisting of X262T, X267G, X294R, X405I, X409I, X480K, X543D, X694I, X1219V, X1224K, X1256K, and X1362P of the amino acid sequence provided in SEQ ID NO: 9, or a corresponding mutation in any of the amino acid sequences provided in SEQ ID NOs: 10-262, wherein X represents any amino acid at the corresponding position.

[0139] In some embodiments, the amino acid sequence of the Cas9 protein comprises at least one, at least two, at least three, at least four, at least five, at least six, or at least seven mutations selected from the group consisting of A262T, S267G, K294R, F405I, S409I, E480K, E543D, M694I, E1219V, N1224K, Q1256K, and L1362P of the amino acid sequence provided in SEQ ID NO: 9, or a corresponding mutation in any of the amino acid sequences provided in SEQ ID NOs: 10-262. In some embodiments, the amino acid sequence of the Cas9 protein comprises an X1219V mutation of the amino acid sequence provided in SEQ ID NO: 9, or a corresponding mutation in any of the amino acid sequences provided in SEQ ID NOs: 10-262. In some embodiments, the amino acid sequence of the Cas9 protein comprises an E1219V mutation of the amino acid sequence provided in SEQ ID NO: 9, or a corresponding mutation in any of the amino acid sequences provided in SEQ ID NOs: 10-262.

[0140] In some embodiments, the amino acid sequence of the Cas9 protein comprises an X480K mutation of the amino acid sequence provided in SEQ ID NO: 9, or a corresponding mutation in any of the amino acid sequences provided in SEQ ID NOs: 10-262. In some embodiments, the amino acid sequence of the Cas9 protein comprises an E480K mutation of the amino acid sequence provided in SEQ ID NO: 9, or a corresponding mutation in any of the amino acid sequences provided in SEQ ID NOs: 10-262.

[0141] In some embodiments, the amino acid sequence of the Cas9 protein comprises an X543D mutation of the amino acid sequence provided in SEQ ID NO: 9, or a corresponding mutation in any of the amino acid sequences provided in SEQ ID NOs: 10-262. In some embodiments, the amino acid sequence of the Cas9 protein comprises an E543D mutation of the amino acid sequence provided in SEQ ID NO: 9, or a corresponding mutation in any of the amino acid sequences provided in SEQ ID NOs: 10-262.

[0142] In some embodiments, the amino acid sequence of the Cas9 protein comprises the combination of mutations selected from the group consisting of (X480K, X543D, and X1219V); (X262T, X409I, X480K, X543D, X694I, and X1219V); (X294R, X480K, X543D, X1219V, X1256K, and X1362P); (X294R, X480K, X543D, X1219V, and X1256K); (X267G, X294R, X480K, X543D, X1219V, X1224K, and X1256K); and (X262T, X405I, X409I, X480K, X543D, X694I, and X1219V) of the amino acid sequence provided in SEQ ID NO: 9, or a corresponding mutation in any of the amino acid sequences provided in SEQ ID NOs: 10-262. In some embodiments, the amino acid sequence of the Cas9 protein comprises the combination of mutations selected from the group consisting of (E480K, E543D, and E1219V); (A262T, S409I, E480K, E543D, M694I, and E1219V); (K294R, E480K, E543D, E1219V, Q1256K, and L1362P); (K294R, E480K, E543D, E1219V, and Q1256K); (S267G, K294R, E480K, E543DE1219V, N1224K, and Q1256K); and (A262T, F405I, S409I, E480K, E543D, M694I, and E1219V) of the amino acid sequence provided in SEQ ID NO: 9, or a corresponding mutation in any of the amino acid sequences provided in SEQ ID NOs: 10-262.

[0143] In some embodiments, the amino acid sequence of the HNH domain is at least 80%, at least 85%, at least 90%, at least 92%, at least 95%, at least 96%, at least 97%, at least 98%, at least 99%, or at least 99.5% identical to the amino acid sequence of the HNH domain of any of SEQ ID NOs: 2, 4, or 9. In some embodiments, the amino acid sequence of the RuvC domain is at least 80%, at least 85%, at least 90%, at least 92%, at least 95%, at least 96%, at least 97%, at least 98%, at least 99%, or at least 99.5% identical to the amino acid sequence of the RuvC domain of any of SEQ ID NOs: 2, 4, or 9. In some embodiments, the Cas9 protein comprises a D10A and/or a H840A mutation of the amino acid sequence provided in SEQ ID NO: 9, or a corresponding mutation in any of the amino acid sequences provided in SEQ ID NOs: 10-262. In some embodiments, the Cas9 protein comprises a D10A and an H840A mutation of the amino acid sequence provided in SEQ ID NO: 9, or a corresponding mutation in any of the amino acid sequences provided in SEQ ID NOs: 10-262. In some embodiments, the Cas9 protein comprises a D10A mutation of the amino acid sequence provided in SEQ ID NO: 9, or a corresponding mutation in any of the amino acid sequences provided in SEQ ID NOs: 10-262. In some embodiments, the Cas9 protein comprises an H840A mutation of the amino acid sequence provided in SEQ ID NO: 9, or a corresponding mutation in any of the amino acid sequences provided in SEQ ID NOs: 10-262.

[0144] Some aspects of this disclosure provide recombinant Cas9 proteins comprising an amino acid sequence that is at least 90% identical to the amino acid sequence of Streptococcus pyogenes Cas9 as provided by SEQ ID NO: 9, comprising the RuvC and HNH domains of SEQ ID NO: 9, wherein the amino acid sequence of the Cas9 protein comprises at least one, at least two, at least three, at least four, at least five, at least six, or at least seven mutations in an amino acid residue selected from the group consisting of amino acid residues 262, 267, 294, 405, 409, 480, 543, 694, 1219, 1224, 1256, and 1362 of the amino acid sequence provided in SEQ ID NO: 9, wherein the amino acid sequence of the recombinant Cas9 protein is not identical to the amino acid sequence of a naturally occurring Cas9 protein, and wherein the recombinant Cas9 protein exhibits increased activity on a target sequence that does not include the canonical PAM (5′-NGG-3′) at its 3′-end as compared to Streptococcus pyogenes Cas9 as provided by SEQ ID NO: 9. In some embodiments, the amino acid sequence of the RuvC domain is at least 80%, at least 85%, at least 90%, at least 92%, at least 95%, at least 96%, at least 97%, at least 98%, at least 99%, or at least 99.5% identical to the amino acid sequence of the RuvC domain of any of SEQ ID NOs: 2, 4, or 9. In some embodiments, the Cas9 protein comprises a D10A and a H840A mutation of the amino acid sequence provided in SEQ ID NO: 9, or a corresponding mutation in any of the amino acid sequences provided in SEQ ID NOs: 10-262.

[0145] Some aspects of this disclosure provide recombinant Cas9 proteins comprising an amino acid sequence that is at least 90% identical to the amino acid sequence of Streptococcus pyogenes Cas9 as provided by SEQ ID NO: 9, comprising the RuvC and HNH domains of SEQ ID NO: 9, wherein the amino acid sequence of the Cas9 protein comprises at least one, at least two, at least three, at least four, at least five, at least six, or at least seven mutations at an amino acid residue selected from the group consisting of amino acid residues 262, 267, 294, 405, 409, 480, 543, 694, 1219, 1224, 1256, and 1362 of the amino acid sequence provided in SEQ ID NO: 9, wherein the amino acid sequence of the recombinant Cas9 protein is not identical to the amino acid sequence of a naturally occurring Cas9 protein, and wherein the recombinant Cas9 protein exhibits increased activity on a target sequence that does not comprise the canonical PAM (5′-NGG-3′) at its 3′-end as compared to Streptococcus pyogenes Cas9 as provided by SEQ ID NO: 9. In some embodiments, the amino acid sequence of the RuvC domain is at least 80%, at least 85%, at least 90%, at least 92%, at least 95%, at least 96%, at least 97%, at least 98%, at least 99%, or at least 99.5% identical to the amino acid sequence of the RuvC domain of any of SEQ ID NOs: 2, 4, or 9. In some embodiments, the Cas9 protein comprises a D10A mutation of the amino acid sequence provided in SEQ ID NO: 9, or a corresponding mutation in any of the amino acid sequences provided in SEQ ID NOs: 10-262. In some embodiments, the Cas9 further comprises a histidine residue at position 840 as provided in SEQ ID NO: 9, or a corresponding histidine residue in any of the amino acid sequences provided in SEQ ID NOs: 10-262. Without wishing to be bound by any particular theory, the presence of the catalytic residue H840 allows Cas9 to cleave the non-targeted strand, i.e., the strand bound by the sgRNA. In some embodiments, a Cas9 having an amino acid residue other than histidine at position 840 of the amino acid sequence provided in SEQ ID NO: 9, or a corresponding amino acid sequence provided in SEQ ID NOs: 10-262 may be changed or reverted such that amino acid residue 840 of the amino acid sequence provided in SEQ ID NO: 9, or a corresponding amino acid sequence provided in SEQ ID NOs: 10-262 is histidine.

### Cas9 Fusion Proteins

[0146] Some aspects of this disclosure provide fusion proteins comprising a Cas9 protein as provided herein that is fused to a second protein, or a “fusion partner”, such as an effector domain, thus forming a fusion protein. In some embodiments, the effector domain is fused to the N-terminus of the Cas9 protein. In some embodiments, the effector domain is fused to the C-terminus of the Cas9 protein. In some embodiments, the Cas9 protein and the effector domain are fused to each other via a linker. Suitable strategies for generating fusion proteins according to aspects of this disclosure using linkers or without the use of linkers will also be apparent to those of skill in the art in view of the instant disclosure and the knowledge in the art. For example, Gilbert et al., CRISPR-mediated modular RNA-guided regulation of transcription in eukaryotes. Cell. 2013; 154 (2): 442-51, showed that C-terminal fusions of Cas9 with VP64 using 2 NLS's as a linker (SPKKKRKVEAS, SEQ ID NO: 284), can be employed for transcriptional activation. Mali et al., CAS9 transcriptional activators for target specificity screening and paired nickases for cooperative genome engineering. Nat Biotechnol. 2013; 31 (9): 833-8, reported that C-terminal fusions with VP64 without linker can be employed for transcriptional activation. And Maeder et al., CRISPR RNA-guided activation of endogenous human genes. Nat Methods. 2013; 10:977-979, reported that C-terminal fusions with VP64 using a Gly Ser (SEQ ID NO: 5) linker can be used as transcriptional activators. Recently, dCas9-FokI nuclease fusions have successfully been generated and exhibit improved enzymatic specificity as compared to the parental Cas9 enzyme (In Guilinger J P, Thompson D B, Liu D R. Fusion of catalytically inactive Cas9 to FokI nuclease improves the specificity of genome modification. Nat. Biotechnol. 2014; 32 (6): 577-82, and in Tsai S Q, Wyvekens N, Khayter C, Foden J A, Thapar V, Reyon D, Goodwin M J, Aryec M J, Joung J K. Dimeric CRISPR RNA-guided FokI nucleases for highly specific genome editing. Nat Biotechnol. 2014; 32 (6): 569-76. PMID: 24770325 a SGSETPGTSESATPES (SEQ ID NO: 7) or a GGGGSₙ (SEQ ID NO: 5) linker was used in FokI-dCas9 fusion proteins, respectively). In some embodiments, the linker comprises a (GGGGS), (SEQ ID NO: 5), a (G)ₙ (SEQ ID NO: 5087), an (EAAAK)ₙ (SEQ ID NO: 6), a (GGS)ₙ (SEQ ID NO: 5088), an SGSETPGTSESATPES (SEQ ID NO: 7), or an (XP)ₙ (SEQ ID NO: 5089) motif, or a combination of any of these, wherein n is independently an integer between 1 and 30. In some embodiments, the effector domain comprises an enzymatic domain. Suitable effector domains include, without limitation a nuclease, nickase, recombinase, deaminase, methyltransferase, methylase, acetylase, acetyltransferase, transcriptional activator, and transcriptional repressor.

[0147] The linker may be as simple as a covalent bond, or it may be a polymeric linker many atoms in length. In certain embodiments, the linker is a polypeptide or based on amino acids. In other embodiments, the linker is not peptide-like. In certain embodiments, the linker is a covalent bond (e.g., a carbon-carbon bond, disulfide bond, carbon-heteroatom bond, etc.). In certain embodiments, the linker is a carbon-nitrogen bond of an amide linkage. In certain embodiments, the linker is a cyclic or acyclic, substituted or unsubstituted, branched or unbranched aliphatic or heteroaliphatic linker. In certain embodiments, the linker is polymeric (e.g., polyethylene, polyethylene glycol, polyamide, polyester, etc.). In certain embodiments, the linker comprises a monomer, dimer, or polymer of aminoalkanoic acid. In certain embodiments, the linker comprises an aminoalkanoic acid (e.g., glycine, ethanoic acid, alanine, beta-alanine, 3-aminopropanoic acid, 4-aminobutanoic acid, 5-pentanoic acid, etc.). In certain embodiments, the linker comprises a monomer, dimer, or polymer of aminohexanoic acid (Ahx). In certain embodiments, the linker is based on a carbocyclic moiety (e.g., cyclopentane, cyclohexane). In other embodiments, the linker comprises a polyethylene glycol moiety (PEG). In other embodiments, the linker comprises amino acids. In certain embodiments, the linker comprises a peptide. In certain embodiments, the linker comprises an aryl or heteroaryl moiety. In certain embodiments, the linker is based on a phenyl ring. The linker may included functionalized moieties to facilitate attachment of a nucleophile (e.g., thiol, amino) from the peptide to the linker. Any electrophile may be used as part of the linker. Exemplary electrophiles include, but are not limited to, activated esters, activated amides, Michael acceptors, alkyl halides, aryl halides, acyl halides, and isothiocyanates.

[0148] In some embodiments, the effector domain comprises a effector enzyme. Suitable effector enzymes that may be used in accordance with this disclosure include nucleases, nickases, recombinases, and deaminases. However additional effector enzymes would be apparent to the skilled artisan and are within the scope of this disclosure. In other embodiments, the effector domain comprises a domain that modulates transcriptional activity. Such transcriptional modulating domains may be, without limitation, a transcriptional activator or transcriptional repressor domain.

[0149] In some embodiments, the effector domain is a effector domain. In some embodiments, the effector domain is a deaminase domain. In some embodiments, the deaminase is a cytosine deaminase or a cytidine deaminase. In some embodiments, the deaminase is an apolipoprotein B mRNA-editing complex (APOBEC) family deaminase. In some embodiments, the deaminase is an APOBEC1 deaminase. In some embodiments, the deaminase is an APOBEC2 deaminase. In some embodiments, the deaminase is an APOBEC3 deaminase. In some embodiments, the deaminase is an APOBEC3A deaminase. In some embodiments, the deaminase is an APOBEC3D deaminase. In some embodiments, the deaminase is an APOBEC3E deaminase. In some embodiments, the deaminase is an APOBEC3F deaminase. In some embodiments, the deaminase is an APOBEC3G deaminase. In some embodiments, the deaminase is an APOBEC3H deaminase. In some embodiments, the deaminase is an APOBEC4 deaminase. In some embodiments, the deaminase is an activation-induced deaminase (AID).

[0150] In some embodiments, the effector domain is at least 80%, at least 85%, at least 90%, at least 92%, at least 95%, at least 96%, at least 97%, at least 98%, at least 99%, or at least 99.5% identical to the deaminase domain of any one of SEQ ID NOs: 263-281.

[0151] In some embodiments, the effector domain is a nuclease domain. In some embodiments, the nuclease domain is a FokI DNA cleavage domain. In some embodiments, this disclosure provides dimers of the fusion proteins provided herein, e.g., dimers of fusion proteins may include a dimerizing nuclease domain.

[0152] In some embodiments, the Cas9 protein comprises an amino acid sequence that is at least 80%, at least 85%, at least 90%, at least 92%, at least 95%, at least 96%, at least 97%, at least 98%, at least 99%, or at least 99.5% identical to the amino acid sequence of Cas9 as provided by any of the sequences provided in SEQ ID NOs: 10-262, wherein the Cas9 protein comprises a RuvC and an HNH domain, wherein the amino acid sequence of the Cas9 protein comprises at least one, at least two, at least three, at least four, at least five, at least six, or at least seven mutations in an amino acid residue selected from the group consisting of amino acid residues 122, 137, 182, 262, 294, 409, 480, 543, 660, 694, 1219, and 1329 of the amino acid sequence provided in SEQ ID NO: 9, or in a corresponding amino acid residue in any of the amino acid sequences provided in SEQ ID NOs: 10-262, and wherein the amino acid sequence of the recombinant Cas9 protein is not identical to the amino acid sequence of a naturally occurring Cas9 protein. In some embodiments, the Cas9 protein comprises an amino acid sequence that is at least 90% identical to the amino acid sequence of Streptococcus pyogenes Cas9 as provided by SEQ ID NO: 9, comprising the RuvC and HNH domains of SEQ ID NO: 9, wherein the amino acid sequence of the Cas9 protein comprises at least one, at least two, at least three, at least four, at least five, at least six, or at least seven mutations in an amino acid residue selected from the group consisting of amino acid residues 122, 137, 182, 262, 294, 409, 480, 543, 660, 694, 1219, and 1329 of the amino acid sequence provided in SEQ ID NO: 9, wherein the amino acid sequence of the recombinant Cas9 protein is not identical to the amino acid sequence of a naturally occurring Cas9 protein, and wherein the recombinant Cas9 protein exhibits activity on a target sequence that does not comprise the canonical PAM (5′-NGG-3′) at its 3′-end as compared to Streptococcus pyogenes Cas9 as provided by SEQ ID NO: 9.

[0153] In some embodiments, the Cas9 protein comprises an amino acid sequence that is at least 80%, at least 85%, at least 90%, at least 92%, at least 95%, at least 96%, at least 97%, at least 98%, at least 99%, or at least 99.5% identical to the amino acid sequence of Cas9 as provided by any of the sequences provided in SEQ ID NOs: 10-262, wherein the Cas9 protein comprises a RuvC and an HNH domain, wherein the amino acid sequence of the Cas9 protein comprises at least one, at least two, at least three, at least four, at least five, at least six, or at least seven mutations in an amino acid residue selected from the group consisting of amino acid residues 262, 267, 294, 405, 409, 480, 543, 694, 1219, 1224, 1256, and 1362 of the amino acid sequence provided in SEQ ID NO: 9, or in a corresponding amino acid residue in any of the amino acid sequences provided in SEQ ID NOs: 10-262, and wherein the amino acid sequence of the recombinant Cas9 protein is not identical to the amino acid sequence of a naturally occurring Cas9 protein. In some embodiments, the Cas9 protein comprises an amino acid sequence that is at least 90% identical to the amino acid sequence of Streptococcus pyogenes Cas9 as provided by SEQ ID NO: 9, comprising the RuvC and HNH domains of SEQ ID NO: 9, wherein the amino acid sequence of the Cas9 protein comprises at least one, at least two, at least three, at least four, at least five, at least six, or at least seven mutations in an amino acid residue selected from the group consisting of amino acid residues 262, 267, 294, 405, 409, 480, 543, 694, 1219, 1224, and 1256 of the amino acid sequence provided in SEQ ID NO: 9; wherein the amino acid sequence of the recombinant Cas9 protein is not identical to the amino acid sequence of a naturally occurring Cas9 protein; and wherein the recombinant Cas9 protein exhibits increased activity on a target sequence that does not include the canonical PAM (5′-NGG-3′) at its 3′-end, as compared to Streptococcus pyogenes Cas9 as provided by SEQ ID NO: 9.

[0154] Some aspects of this disclosure provide fusion proteins comprising (i) a nuclease-inactive Cas9 protein; and (ii) a effector domain. In some embodiments, the effector domain is a DNA-editing domain. In some embodiments, the effector domain possesses deaminase activity. In some embodiments, the effector domain comprises or is a deaminase domain. In some embodiments, the deaminase is a cytidine deaminase. In some embodiments, the deaminase is an apolipoprotein B mRNA-editing complex (APOBEC) family deaminase. In some embodiments, the deaminase is an APOBEC1 family deaminase. In some embodiments, the deaminase is an activation-induced cytidine deaminase (AID). Some nucleic-acid editing domains as well as Cas9 fusion proteins including such domains are described in detail herein. Additional suitable effector domains will be apparent to the skilled artisan based on this disclosure. In some embodiments, the nucleic-acid editing domain is a FokI nuclease domain.

[0155] The instant disclosure provides Cas9:effector domain fusion proteins of various configurations. In some embodiments, the effector domain is fused to the N-terminus of the Cas9 protein. In some embodiments, the effector domain is fused to the C-terminus of the Cas9 protein. In some embodiments, the Cas9 protein and the effector domain are fused via a linker. In some embodiments, the linker comprises (GGGGS)ₙ (SEQ ID NO: 5), (G)ₙ (SEQ ID NO: 5087), (EAAAK)ₙ (SEQ ID NO: 6), (GGS)ₙ (SEQ ID NO: 5088), or SGSETPGTSESATPES (SEQ ID NO: 7) motif (see, e.g., Guilinger J P, Thompson D B, Liu D R. Fusion of catalytically inactive Cas9 to FokI nuclease improves the specificity of genome modification. Nat. Biotechnol. 2014; 32 (6): 577-82; the entire contents are incorporated herein by reference), or an (XP), (SEQ ID NO: 5089) motif, or a combination of any of these, wherein n is independently an integer between 1 and 30. In some embodiments, n is independently 1, 2, 3, 4, 5, 6, 7, 8, 9, 10, 11, 12, 13, 14, 15, 16, 17, 18, 19, 20, 21, 22, 23, 24, 25, 26, 27, 28, 29, or 30, or, if more than one linker or more than one linker motif is present, any combination thereof. Additional suitable linker motifs and linker configurations will be apparent to those of skill in the art. In some embodiments, suitable linker motifs and configurations include those described in Chen et al., Fusion protein linkers: property, design and functionality. Adv Drug Deliv Rev. 2013; 65 (10): 1357-69, the entire contents of which are incorporated herein by reference. Additional suitable linker sequences will be apparent to those of skill in the art based on the instant disclosure and knowledge in the art.

[0156] In some embodiments, the general architecture of exemplary Cas9 fusion proteins provided herein comprises the structure:
[0157] [NH₂]-[effector domain]-[Cas9]-[COOH] or
   [0158] [NH₂]-[Cas9]-[effector domain]-[COOH],
      wherein NH₂ is the N-terminus of the fusion protein, and COOH is the C-terminus of the fusion protein. FIG. 11 provides a schematic representation of a Cas9 protein fused to an effector domain (e.g., rAPOBEC1) in complex with sgRNA and bound to the target nucleic acid sequence.

[0159] In some embodiments, any of the fusion proteins provided herein may comprise one or more nuclear localization sequence (NLS). As used herein, a nuclear localization sequence refers to an amino acid sequence that promotes importation of a protein, for example any of the fusion proteins provided herein having an NLS, into the cell nucleus (e.g., via nuclear transport). Typically, an NLS comprises one or more short amino acid sequences of positively charged lysines or arginines exposed on the protein surface. Nuclear localization sequences are known in the art and would be apparent to the skilled artisan. For example nuclear localization sequences have been described in Kalderon D., et al., “A short amino acid sequence able to specify nuclear location”. Cell (1984) 39 (3 Pt 2): 499-509; Dingwall C., et al., “The nucleoplasmin nuclear location sequence is larger and more complex than that of SV-40 large T antigen”. J Cell Biol. (1988) 107 (3): 841-9; Makkerh J. P., et al., “Comparative mutagenesis of nuclear localization signals reveals the importance of neutral and acidic amino acids”. Curr Biol. (1996) 6 (8): 1025-7; and Ray M., et al., “Quantitative tracking of protein trafficking to the nucleus using cytosolic protein delivery by nanoparticle-stabilized nanocapsules”. Bioconjug. Chem. (2015) 26 (6): 1004-7; the entire contents of each are incorporated by reference herein. Additional nuclear localization sequences are described, for example, in Plank et al., PCT/EP2000/011690, the entire contents are incorporated by reference herein. In some embodiments, a NLS comprises the amino acid sequence PKKKRKV (SEQ ID NO: 299) or MDSLLMNRRKFLYQFKNVRWAKGRRETYLC (SEQ ID NO: 300).

[0160] Exemplary features that may be present are localization sequences, such as nuclear localization sequences, cytoplasmic localization sequences, export sequences, such as nuclear export sequences, or other localization sequences, as well as sequence tags that are useful for solubilization, purification, or detection of the fusion proteins. Suitable localization signal sequences and sequences of protein tags are provided herein, and include, but are not limited to, biotin carboxylase carrier protein (BCCP) tags, myc-tags, calmodulin-tags, FLAG-tags, hemagglutinin (HA)-tags, polyhistidine tags, also referred to as histidine tags or His-tags, maltose binding protein (MBP)-tags, nus-tags, glutathione-S-transferase (GST)-tags, green fluorescent protein (GFP)-tags, thioredoxin-tags, S-tags, Softags (e.g., Softag 1, Softag 3), strep-tags, biotin ligase tags, FLASH tags, V5 tags, and SBP-tags. Additional suitable sequences will be apparent to those of skill in the art and are within the scope of this disclosure.

[0161] Any of the nuclear localization sequences provided herein may be fused to the fusion protein in any suitable localization. For example, to promote translocation of the fusion protein into a cell nucleus without compromising function of the fusion protein. In some embodiments, the NLS is fused N-terminal to the Cas9 protein of the fusion protein. In some embodiments, the NLS is fused C-terminal to the Cas9 protein of the fusion protein. In some embodiments, the NLS is fused N-terminal to the effector domain of the fusion protein. In some embodiments, the NLS is fused C-terminal to the effector domain of the fusion protein.

[0162] In some embodiments, the effector domain is a deaminase. For example, in some embodiments, the general architecture of exemplary Cas9 fusion proteins with a deaminase domain comprises the structure:
[0163] [NH₂]-[NLS]-[Cas9]-[deaminase]-[COOH],
[0164] [NH₂]-[NLS]-[deaminase]-[Cas9]-[COOH],
[0165] [NH₂]-[Cas9]-[NLS]-[deaminase]-[COOH],
[0166] [NH₂]-[deaminase]-[NLS]-[Cas9]-[COOH],
[0167] [NH₂]-[deaminase]-[Cas9]-[NLS]-[COOH], or
[0168] [NH₂]-[Cas9]-[deaminase]-[NLS]-[COOH],
   wherein NLS is a nuclear localization signal, NH₂ is the N-terminus of the fusion protein, and COOH is the C-terminus of the fusion protein. In some embodiments, a linker is inserted between the Cas9 protein and the deaminase domain. In some embodiments, any of the “]-[” may be one or more linkers. In some embodiments, the NLS is located C-terminal of the deaminase and/or the Cas9 domain. In some embodiments, the NLS is located between the deaminase and the Cas9 domain. Additional features, such as sequence tags, may also be present.

[0169] One exemplary suitable type of effector domain includes cytosine deaminases, for example, of the APOBEC family. The apolipoprotein B mRNA-editing complex (APOBEC) family of cytosine deaminase enzymes encompasses eleven proteins that serve to initiate mutagenesis in a controlled and beneficial manner.²⁹ One family member, activation-induced cytidine deaminase (AID), is responsible for the maturation of antibodies by converting cytosines in ssDNA to uracils in a transcription-dependent, strand-biased fashion.³⁰ The apolipoprotein B editing complex 3 (APOBEC3) enzyme provides protection to human cells against a certain HIV-1 strain via the deamination of cytosines in reverse-transcribed viral SSDNA.³¹ These proteins all require a Zn²⁺-coordinating motif (His-X-Glu-X₂₃₋₂₆-Pro-Cys-X₂₋₄-Cys; SEQ ID NO: 283) and bound water molecule for catalytic activity. The Glu residue acts to activate the water molecule to a zinc hydroxide for nucleophilic attack in the deamination reaction. Each family member preferentially deaminates at its own particular “hotspot,” ranging from WRC (W is A or T, R is A or G) for hAID, to TTC for hAPOBEC3F.³² A recent crystal structure of the catalytic domain of APOBEC3G revealed a secondary structure comprised of a five-stranded β-sheet core flanked by six α-helices, which is believed to be conserved across the entire family.³³ The active center loops have been shown to be responsible for both ssDNA binding and in determining “hotspot” identity.³⁴ Overexpression of these enzymes has been linked to genomic instability and cancer, thus highlighting the importance of sequence-specific targeting.³⁵

[0170] Some aspects of this disclosure provide a systematic series of fusions between Cas9 and deaminase domains, e.g., cytosine deaminase enzymes such as APOBEC enzymes, or adenosine deaminase enzymes such as ADAT enzymes, that has been generated in order to direct the enzymatic activities of these deaminases to a specific site in genomic DNA. The advantages of using Cas9 as the recognition agent are two-fold: (1) the sequence specificity of Cas9 can be easily altered by simply changing the sgRNA sequence; and (2) Cas9 binds to its target sequence by denaturing the dsDNA, resulting in a stretch of DNA that is single-stranded and therefore a viable substrate for the deaminase. It will be understood that other catalytic domains, or catalytic domains from other deaminases, can also be used to generate fusion proteins with Cas9, and that the disclosure is not limited in this regard.

[0171] Some aspects of this disclosure are based on the recognition that cas9: deaminase fusion proteins can efficiently deaminate nucleotides at positions 3-11 according to the numbering scheme in FIG. 11. It should be appreciated that a person of skill in the art will be able to design suitable guide RNAs to target the fusion proteins to a target sequence that comprises a nucleotide to be deaminated. Both PAM-dependent Cas9 proteins or Cas9 proteins that can target PAM-less target sequences as provided herein, can be employed for deamination of a target nucleotide.

[0172] Some exemplary suitable nucleic-acid editing domains, e.g., deaminases and deaminase domains, that can be fused to Cas9 domains according to aspects of this disclosure are provided below. Typically, deaminase require a Zn²⁺-coordinating motif (His-X-Glu-X₂₃₋₂₆-Pro-Cys-X₂₋₄-Cys; SEQ ID NO: 283) and bound water molecule for catalytic activity. The Glu residue acts to activate the water molecule to a zinc hydroxide for nucleophilic attack in the deamination reaction. It will be understood that, in some embodiments, the active domain of the respective sequence can be used, e.g., the domain without a localizing signal (nuclear localizing signal, without nuclear export signal, cytoplasmic localizing signal).

Human AID:
(SEQ ID NO: 263)
[sequence omitted]
(underline: nuclear localization signal; double underline:
nuclear export signal)
Mouse AID:
(SEQ ID NO: 264)
MDSLLMKQKKFLYHFKNVRWAKGRHETYLCYVVKRRDSATSCSLDFGHLRNKSGCHV
ELLFLRYISDWDLDPGRCYRVTWFTSWSPCYDCARHVAEFLRWNPNLSLRIFTARLYFC
EDRKAEPEGLRRLHRAGVQIGIMTFKDYFYCWNTFVENRERTFKAWEGLHENSVRLTR
QLRRILLPLYEVDDLRDAFRMLGE
(underline: nuclear localization signal; double underline:
nuclear export signal)
Dog AID:
(SEQ ID NO: 265)
MDSLLMKQRKFLYHFKNVRWAKGRHETYLCYVVKRRDSATSFSLDFGHLRNKSGCHV
ELLFLRYISDWDLDPGRCYRVTWFTSWSPCYDCARHVADFLRGYPNLSLRIFAARLYFC
EDRKAEPEGLRRLHRAGVQIAIMTFKDYFYCWNTFVENREKTFKAWEGLHENSVRLSR
QLRRILLPLYEVDDLRDAFRTLGL
(underline: nuclear localization signal; double underline:
nuclear export signal)
Bovine AID:
(SEQ ID NO: 266)
MDSLLKKQRQFLYQFKNVRWAKGRHETYLCYVVKRRDSPTSFSLDFGHLRNKAGCHV
ELLFLRYISDWDLDPGRCYRVTWFTSWSPCYDCARHVADFLRGYPNLSLRIFTARLYFC
DKERKAEPEGLRRLHRAGVQIAIMTFKDYFYCWNTFVENHERTFKAWEGLHENSVRLS
RQLRRILLPLYEVDDLRDAFRTLGL
(underline: nuclear localization signal; double underline:
nuclear export signal)
Mouse APOBEC-3:
(SEQ ID NO: 267)
MGPFCLGCSHRKCYSPIRNLISQETFKFHFKNLGYAKGRKDTFLCYEVTRKDCDSPVSLH
HGVFKNKDNIHAEICFLYWFHDKVLKVLSPREEFKITWYMSWSPCFECAEQIVRFLATHHN
LSLDIFSSRLYNVQDPETQQNLCRLVQEGAQVAAMDLYEFKKCWKKFVDNGGRRFRP
WKRLLTNFRYQDSKLQEILRPCYIPVPSSSSSTLSNICLTKGLPETRFCVEGRRMDPLSEE
EFYSQFYNQRVKHLCYYHRMKPYLCYQLEQFNGQAPLKGCLLSEKGKQHAEILFLDKIR
SMELSQVTITCYLTWSPCPNCAWQLAAFKRDRPDLILHIYTSRLYFHWKRPFQKGLCSLW
QSGILVDVMDLPQFTDCWTNFVNPKRPFWPWKGLEIISRRTQRRLRRIKESWGLQDLVN
DFGNLQLGPPMS
(italic: nucleic acid editing domain)
Rat APOBEC-3:
(SEQ ID NO: 268)
MGPFCLGCSHRKCYSPIRNLISQETFKFHFKNLRYAIDRKDTFLCYEVTRKDCDSPVSLH
HGVFKNKDNIHAEICFLYWFHDKVLKVLSPREEFKITWYMSWSPCFECAEQVLRFLATHHN
LSLDIFSSRLYNIRDPENQQNLCRLVQEGAQVAAMDLYEFKKCWKKFVDNGGRRFRPW
KKLLTNFRYQDSKLQEILRPCYIPVPSSSSSTLSNICLTKGLPETRFCVERRRVHLLSEEEF
YSQFYNQRVKHLCYYHGVKPYLCYQLEQFNGQAPLKGCLLSEKGKQHAEILFLDKIRSM
ELSQVIITCYLTWSPCPNCAWQLAAFKRDRPDLILHIYTSRLYFHWKRPFQKGLCSLWQSG
ILVDVMDLPQFTDCWTNFVNPKRPFWPWKGLEIISRRTQRRLHRIKESWGLQDLVNDFG
NLQLGPPMS
(italic: nucleic acid editing domain)
Rhesus macaque APOBEC-3G:
(SEQ ID NO: 269)
MVEPMDPRTFVSNFNNRPILSGLNTVWLCCEVKTKDPSGPPLDAKIFQGKVYSKAKYHP
EMRFLRWFHKWRQLHHDQEYKVTWYVSWSPCTRCANSVATFLAKDPKVTLTIFVARLYY
FWKPDYQQALRILCQKRGGPHATMKIMNYNEFQDCWNKFVDGRGKPFKPRNNLPKHY
TLLQATLGELLRHLMDPGTFTSNFNNKPWVSGQHETYLCYKVERLHNDTWVPLNQHR
GFLRNQAPNIHGFPKGRHAELCFLDLIPFWKLDGQQYRVTCFTSWSPCFSCAQEMAKFISN
NEHVSLCIFAARIYDDQGRYQEGLRALHRDGAKIAMMNYSEFEYCWDTFVDRQGRPFQ
PWDGLDEHSQALSGRLRAI
(italic: nucleic acid editing domain; underline: cytoplasmic
localization signal)
Chimpanzee APOBEC-3G:
(SEQ ID NO: 270)
MKPHFRNPVERMYQDTESDNFYNRPILSHRNTVWLCYEVKTKGPSRPPLDAKIFRGQVY
SKLKYHPEMRFFHWFSKWRKLHRDQEYEVTWYISWSPCTKCTRDVATFLAEDPKVTLTIF
VARLYYFWDPDYQEALRSLCQKRDGPRATMKIMNYDEFQHCWSKFVYSQRELFEPWN
NLPKYYILLHIMLGEILRHSMDPPTFTSNFNNELWVRGRHETYLCYEVERLHNDTWVLL
NQRRGFLCNQAPHKHGFLEGRHAELCFLDVIPFWKLDLHQDYRVTCFTSWSPCFSCAQEM
AKFISNNKHVSLCIFAARIYDDQGRCQEGLRTLAKAGAKISIMTYSEFKHCWDTFVDHQ
GCPFQPWDGLEEHSQALSGRLRAILQNQGN
(italic: nucleic acid editing domain; underline: cytoplasmic
localization signal)
Green monkey APOBEC-3G:
(SEQ ID NO: 271)
MNPQIRNMVEQMEPDIFVYYFNNRPILSGRNTVWLCYEVKTKDPSGPPLDANIFQGKLY
PEAKDHPEMKFLHWFRKWRQLHRDQEYEVTWYVSWSPCTRCANSVATFLAEDPKVTLTIF
VARLYYFWKPDYQQALRILCQERGGPHATMKIMNYNEFQHCWNEFVDGQGKPFKPRK
NLPKHYTLLHATLGELLRHVMDPGTFTSNFNNKPWVSGQRETYLCYKVERSHNDTWV
LLNQHRGFLRNQAPDRHGFPKGRHAELCFLDLIPFWKLDDQQYRVTCFTSWSPCFSCAQK
MAKFISNNKHVSLCIFAARIYDDQGRCQEGLRTLHRDGAKIAVMNYSEFEYCWDTFVD
RQGRPFQPWDGLDEHSQALSGRLRAI
(italic: nucleic acid editing domain; underline: cytoplasmic
localization signal)
Human APOBEC-3G:
(SEQ ID NO: 272)
MKPHFRNTVERMYRDTFSYNFYNRPILSRRNTVWLCYEVKTKGPSRPPLDAKIFRGQVY
SELKYHPEMRFFHWFSKWRKLHRDQEYEVTWYISWSPCTKCTRDMATFLAEDPKVTLTIF
VARLYYFWDPDYQEALRSLCQKRDGPRATMKIMNYDEFQHCWSKFVYSQRELFEPWN
NLPKYYILLHIMLGEILRHSMDPPTFTFNFNNEPWVRGRHETYLCYEVERMHNDTWVLL
NQRRGFLCNQAPHKHGFLEGRHAELCFLDVIPFWKLDLDQDYRVTCFTSWSPCFSCAQEM
AKFISKNKHVSLCIFTARIYDDQGRCQEGLRTLAEAGAKISIMTYSEFKHCWDTFVDHQ
GCPFQPWDGLDEHSQDLSGRLRAILQNQEN
(italic: nucleic acid editing domain; underline: cytoplasmic
localization signal)
Human APOBEC-3F:
(SEQ ID NO: 273)
MKPHFRNTVERMYRDTFSYNFYNRPILSRRNTVWLCYEVKTKGPSRPRLDAKIFRGQV
YSQPEHHAEMCFLSWFCGNQLPAYKCFQITWFVSWTPCPDCVAKLAEFLAEHPNVTLTIS
AARLYYYWERDYRRALCRLSQAGARVKIMDDEEFAYCWENFVYSEGQPFMPWYKFD
DNYAFLHRTLKEILRNPMEAMYPHIFYFHFKNLRKAYGRNESWLCFTMEVVKHHSPVS
WKRGVFRNQVDPETHCHAERCFLSWFCDDILSPNTNYEVTWYTSWSPCPECAGEVAEFLA
RHSNVNLTIFTARLYYFWDTDYQEGLRSLSQEGASVEIMGYKDFKYCWENFVYNDDEP
FKPWKGLKYNFLFLDSKLQEILE
(italic: nucleic acid editing domain)
Human APOBEC-3B:
(SEQ ID NO: 274)
MNPQIRNPMERMYRDTFYDNFENEPILYGRSYTWLCYEVKIKRGRSNLLWDTGVFRGQ
VYFKPQYHAEMCFLSWFCGNQLPAYKCFQITWFVSWTPCPDCVAKLAEFLSEHPNVTLTI
SAARLYYYWERDYRRALCRLSQAGARVTIMDYEEFAYCWENFVYNEGQQFMPWYKF
DENYAFLHRTLKEILRYLMDPDTFTFNFNNDPLVLRRRQTYLCYEVERLDNGTWVLMD
QHMGFLCNEAKNLLCGFYGRHAELRFLDLVPSLQLDPAQIYRVTWFISWSPCFSWGCAGE
VRAFLQENTHVRLRIFAARIYDYDPLYKEALQMLRDAGAQVSIMTYDEFEYCWDTFVY
RQGCPFQPWDGLEEHSQALSGRLRAILQNQGN
(italic: nucleic acid editing domain)
Human APOBEC-3C:
(SEQ ID NO: 275)
MNPQIRNPMKAMYPGTFYFQFKNLWEANDRNETWLCFTVEGIKRRSVVSWKTGVFRN
QVDSETHCHAERCFLSWFCDDILSPNTKYQVTWYTSWSPCPDCAGEVAEFLARHSNVNLTI
FTARLYYFQYPCYQEGLRSLSQEGVAVEIMDYEDFKYCWENFVYNDNEPFKPWKGLKT
NFRLLKRRLRESLQ
(italic: nucleic acid editing domain)
Human APOBEC-3A:
(SEQ ID NO: 276)
MEASPASGPRHLMDPHIFTSNFNNGIGRHKTYLCYEVERLDNGTSVKMDQHRGFLHNQ
AKNLLCGFYGRHAELRFLDLVPSLQLDPAQIYRVTWFISWSPCFSWGCAGEVRAFLQENTH
VRLRIFAARIYDYDPLYKEALQMLRDAGAQVSIMTYDEFKHCWDTFVDHQGCPFQPWD
GLDEHSQALSGRLRAILQNQGN
(italic: nucleic acid editing domain)
Human APOBEC-3H:
(SEQ ID NO: 277)
MALLTAETFRLQFNNKRRLRRPYYPRKALLCYQLTPQNGSTPTRGYFENKKKCHAEICFI
NEIKSMGLDETQCYQVTCYLTWSPCSSCAWELVDFIKAHDHLNLGIFASRLYYHWCKPQQ
KGLRLLCGSQVPVEVMGFPKFADCWENFVDHEKPLSFNPYKMLEELDKNSRAIKRRLE
RIKIPGVRAQGRYMDILCDAEV
(italic: nucleic acid editing domain)
Human APOBEC-3D:
(SEQ ID NO: 278)
MNPQIRNPMERMYRDTFYDNFENEPILYGRSYTWLCYEVKIKRGRSNLLWDTGVFRGP
VLPKRQSNHRQEVYFRFENHAEMCFLSWFCGNRLPANRRFQITWFVSWNPCLPCVVKVT
KFLAEHPNVTLTISAARLYYYRDRDWRWVLLRLHKAGARVKIMDYEDFAYCWENFVC
NEGQPFMPWYKFDDNYASLHRTLKEILRNPMEAMYPHIFYFHFKNLLKACGRNESWLC
FTMEVTKHHSAVFRKRGVFRNQVDPETHCHAERCFLSWFCDDILSPNTNYEVTWYTSWSP
CPECAGEVAEFLARHSNVNLTIFTARLCYFWDTDYQEGLCSLSQEGASVKIMGYKDFVS
CWKNFVYSDDEPFKPWKGLQTNFRLLKRRLREILQ
(italic: nucleic acid editing domain)
Human APOBEC-1:
(SEQ ID NO: 279)
MTSEKGPSTGDPTLRRRIEPWEFDVFYDPRELRKEACLLYEIKWGMSRKIWRSSGKNTT
NHVEVNFIKKFTSERDFHPSMSCSITWFLSWSPCWECSQAIREFLSRHPGVTLVIYVARLF
WHMDQQNRQGLRDLVNSGVTIQIMRASEYYHCWRNFVNYPPGDEAHWPQYPPLWMM
LYALELHCIILSLPPCLKISRRWQNHLTFFRLHLQNCHYQTIPPHILLATGLIHPSVAWR
Mouse APOBEC-1:
(SEQ ID NO: 280)
MSSETGPVAVDPTLRRRIEPHEFEVFFDPRELRKETCLLYEINWGGRHSVWRHTSQNTSN
HVEVNFLEKFTTERYFRPNTRCSITWFLSWSPCGECSRAITEFLSRHPYVTLFIYIARLYH
HTDQRNRQGLRDLISSGVTIQIMTEQEYCYCWRNFVNYPPSNEAYWPRYPHLWVKLYV
LELYCIILGLPPCLKILRRKQPQLTFFTITLQTCHYQRIPPHLLWATGLK
Rat APOBEC-1:
(SEQ ID NO: 281)
[sequence omitted]

[0173] In some embodiments, fusion proteins as provided herein comprise the full-length amino acid of a effector domain, e.g., one of the sequences provided above. In other embodiments, however, fusion proteins as provided herein do not comprise a full-length sequence of a effector domain, but only a fragment thereof. For example, in some embodiments, a fusion protein provided herein comprises a Cas9 protein and a fragment of a effector domain, e.g., wherein the fragment comprises a effector domain. Exemplary amino acid sequences of effector domains are shown in the sequences above as italicized letters, and additional suitable sequences of such domains will be apparent to those of skill in the art.

[0174] Additional suitable nucleic-acid editing domain, e.g., deaminase domain sequences, that can be used according to aspects of this disclosure, e.g., that can be fused to a nuclease-inactive Cas9 protein, will be apparent to those of skill in the art based on this disclosure. In some embodiments, such additional domain sequences include deaminase domain sequences that are at least 70%, at least 75%, at least 80%, at least 85%, at least 90%, at least 95%, at least 96%, at least 97%, at least 98%, or at least 99% similar to the sequences provided herein. Additional suitable Cas9 proteins, variants, and sequences will also be apparent to those of skill in the art. Examples of such additional suitable Cas9 proteins include, but are not limited to Cas9 proteins with the following mutations: D10A, D10A/D839A/H840A, and D10A/D839A/H840A/N863A (See, e.g., Prashant et al., CAS9 transcriptional activators for target specificity screening and paired nickases for cooperative genome engineering. Nature Biotechnology. 2013; 31 (9): 833-838 the entire contents of which are incorporated herein by reference).

[0175] Additional suitable strategies for generating fusion proteins comprising a Cas9 protein and an effector domain, such as a DNA-editing domain, will be apparent to those of skill in the art based on this disclosure in combination with the general knowledge in the art. Suitable strategies for generating fusion proteins according to aspects of this disclosure using linkers or without the use of linkers will also be apparent to those of skill in the art in view of the instant disclosure and the knowledge in the art. For example, Gilbert et al., CRISPR-mediated modular RNA-guided regulation of transcription in eukaryotes. Cell. 2013; 154 (2): 442-51, showed that C-terminal fusions of Cas9 with VP64 using 2 NLS's as a linker (SPKKKRKVEAS, SEQ ID NO: 284), can be employed for transcriptional activation. Mali et al., Cas9 transcriptional activators for target specificity screening and paired nickases for cooperative genome engineering. Nat Biotechnol. 2013; 31 (9): 833-8, reported that C-terminal fusions with VP64 without linker can be employed for transcriptional activation. And Maeder et al., CRISPR RNA-guided activation of endogenous human genes. Nat Methods. 2013; 10:977-979, reported that C-terminal fusions with VP64 using a Gly4Ser (SEQ ID NO: 5) linker can be used as transcriptional activators. Recently, dCas9-FokI nuclease fusions have successfully been generated and exhibit improved enzymatic specificity as compared to the parental Cas9 enzyme (In Guilinger J P, Thompson D B, Liu D R. Fusion of catalytically inactive Cas9 to FokI nuclease improves the specificity of genome modification. Nat. Biotechnol. 2014; 32 (6): 577-82, and in Tsai S Q, Wyvekens N, Khayter C, Foden J A, Thapar V, Reyon D, Goodwin M J, Aryee M J, Joung J K. Dimeric CRISPR RNA-guided FokI nucleases for highly specific genome editing. Nat. Biotechnol. 2014; 32 (6): 569-76. PMID: 24770325 a SGSETPGTSESATPES (SEQ ID NO: 7) or a GGGGS (SEQ ID NO: 5) linker was used in FokI-dCas9 fusion proteins, respectively).

[0176] In some embodiments, the Cas9 fusion protein comprises: (i) Cas9 protein; and (ii) a transcriptional activator domain. In some embodiments, the transcriptional activator domain comprises a VPR. VPR is a VP64-SV40-P65-RTA tripartite activator. In some embodiments, VPR comprises a VP64 amino acid sequence encoded by the nucleic acid sequence of SEQ ID NO: 292:

(SEQ ID NO: 292)
GAGGCCAGCGGTTCCGGACGGGCTGACGCATTGGACGATTTTGATCTGG
ATATGCTGGGAAGTGACGCCCTCGATGATTTTGACCTTGACATGCTTGG
TTCGGATGCCCTTGATGACTTTGACCTCGACATGCTCGGCAGTGACGCC
CTTGATGATTTCGACCTGGACATGCTGATTAACTCTAGATAG

[0177] In some embodiments. VPR comprises a VP64 amino acid sequence as set forth in SEQ ID NO: 293:

(SEQ ID NO: 293)
EASGSGRADALDDFDLDMLGSDALDDFDLDMLGSDALDDFDLDMLGSDAL
DDFDLDMLINSR

[0178] In some embodiments. VPR comprises a VP64-SV40-P65-RTA amino acid sequence encoded by the nucleic acid sequence of SEQ ID NO: 294:

(SEQ ID NO: 294)
TCGCCAGGGATCCGTCGACTTGACGCGTTGATATCAACAAGTTTGTACAAAAAAGCA
GGCTACAAAGAGGCCAGCGGTTCCGGACGGGCTGACGCATTGGACGATTTTGATCT
GGATATGCTGGGAAGTGACGCCCTCGATGATTTTGACCTTGACATGCTTGGTTCGGA
TGCCCTTGATGACTTTGACCTCGACATGCTCGGCAGTGACGCCCTTGATGATTTCGA
CCTGGACATGCTGATTAACTCTAGAAGTTCCGGATCTCCGAAAAAGAAACGCAAAG
TTGGTAGCCAGTACCTGCCCGACACCGACGACCGGCACCGGATCGAGGAAAAGCGG
AAGCGGACCTACGAGACATTCAAGAGCATCATGAAGAAGTCCCCCTTCAGCGGCCC
CACCGACCCTAGACCTCCACCTAGAAGAATCGCCGTGCCCAGCAGATCCAGCGCCA
GCGTGCCAAAACCTGCCCCCCAGCCTTACCCCTTCACCAGCAGCCTGAGCACCATCA
ACTACGACGAGTTCCCTACCATGGTGTTCCCCAGCGGCCAGATCTCTCAGGCCTCTG
CTCTGGCTCCAGCCCCTCCTCAGGTGCTGCCTCAGGCTCCTGCTCCTGCACCAGCTCC
AGCCATGGTGTCTGCACTGGCTCAGGCACCAGCACCCGTGCCTGTGCTGGCTCCTGG
ACCTCCACAGGCTGTGGCTCCACCAGCCCCTAAACCTACACAGGCCGGCGAGGGCA
CACTGTCTGAAGCTCTGCTGCAGCTGCAGTTCGACGACGAGGATCTGGGAGCCCTGC
TGGGAAACAGCACCGATCCTGCCGTGTTCACCGACCTGGCCAGCGTGGACAACAGC
GAGTTCCAGCAGCTGCTGAACCAGGGCATCCCTGTGGCCCCTCACACCACCGAGCCC
ATGCTGATGGAATACCCCGAGGCCATCACCCGGCTCGTGACAGGCGCTCAGAGGCC
TCCTGATCCAGCTCCTGCCCCTCTGGGAGCACCAGGCCTGCCTAATGGACTGCTGTC
TGGCGACGAGGACTTCAGCTCTATCGCCGATATGGATTTCTCAGCCTTGCTGGGCTC
TGGCAGCGGCAGCCGGGATTCCAGGGAAGGGATGTTTTTGCCGAAGCCTGAGGCCG
GCTCCGCTATTAGTGACGTGTTTGAGGGCCGCGAGGTGTGCCAGCCAAAACGAATCC
GGCCATTTCATCCTCCAGGAAGTCCATGGGCCAACCGCCCACTCCCCGCCAGCCTCG
CACCAACACCAACCGGTCCAGTACATGAGCCAGTCGGGTCACTGACCCCGGCACCA
GTCCCTCAGCCACTGGATCCAGCGCCCGCAGTGACTCCCGAGGCCAGTCACCTGTTG
GAGGATCCCGATGAAGAGACGAGCCAGGCTGTCAAAGCCCTTCGGGAGATGGCCGA
TACTGTGATTCCCCAGAAGGAAGAGGCTGCAATCTGTGGCCAAATGGACCTTTCCCA
TCCGCCCCCAAGGGGCCATCTGGATGAGCTGACAACCACACTTGAGTCCATGACCG
AGGATCTGAACCTGGACTCACCCCTGACCCCGGAATTGAACGAGATTCTGGATACCT
TCCTGAACGACGAGTGCCTCTTGCATGCCATGCATATCAGCACAGGACTGTCCATCT
TCGACACATCTCTGTTTTGA

[0179] In some embodiments, VPR comprises a VP64-SV40-P65-RTA amino acid sequence as set forth in SEQ ID NO: 295:

(SEQ ID NO: 295)
SPGIRRLDALISTSLYKKAGYKEASGSGRADALDDFDLDMLGSDALDDFD
LDMLGSDALDDFDLDMLGSDALDDFDLDMLINSRSSGSPKKKRKVGSQYL
PDTDDRHRIEEKRKRTYETFKSIMKKSPFSGPTDPRPPPRRIAVPSRSSA
SVPKPAPQPYPFTSSLSTINYDEFPTMVFPSGQISQASALAPAPPQVLPQ
APAPAPAPAMVSALAQAPAPVPVLAPGPPQAVAPPAPKPTQAGEGTLSEA
LLQLQFDDEDLGALLGNSTDPAVFTDLASVDNSEFQQLLNQGIPVAPHTT
EPMLMEYPEAITRLVTGAQRPPDPAPAPLGAPGLPNGLLSGDEDFSSIAD
MDFSALLGSGSGSRDSREGMFLPKPEAGSAISDVFEGREVCQPKRIRPFH
PPGSPWANRPLPASLAPTPTGPVHEPVGSLTPAPVPQPLDPAPAVTPEAS
HLLEDPDEETSQAVKALREMADTVIPQKEEAAICGQMDLSHPPPRGHLDE
LTTTLESMTEDLNLDSPLTPELNEILDTFLNDECLLHAMHISTGLSIFDT
SLF

[0180] Some aspects of this disclosure provide fusion proteins comprising a transcription activator. In some embodiments, the transcriptional activator is VPR. In some embodiments, the VPR comprises a wild type VPR or a VPR as set forth in SEQ ID NO: 293. In some embodiments, the VPR proteins provided herein include fragments of VPR and proteins homologous to a VPR or a VPR fragment. For example, in some embodiments, a VPR comprises a fragment of the amino acid sequence set forth in SEQ ID NO: 293. In some embodiments, a VPR comprises an amino acid sequence homologous to the amino acid sequence set forth in SEQ ID NO: 293 or an amino acid sequence homologous to a fragment of the amino acid sequence set forth in SEQ ID NO: 293. In some embodiments, proteins comprising VPR or fragments of VPR or homologs of VPR or VPR fragments are referred to as “VPR variants.” A VPR variant shares homology to VPR, or a fragment thereof. For example a VPR variant is at least about 70% identical, at least about 80% identical, at least about 90% identical, at least about 95% identical, at least about 96% identical, at least about 97% identical, at least about 98% identical, at least about 99% identical, at least about 99.5% identical, or at least about 99.9% to a wild type VPR or a VPR as set forth in SEQ ID NO: 293. In some embodiments, the VPR variant comprises a fragment of VPR, such that the fragment is at least about 70% identical, at least about 80% identical, at least about 90% identical, at least about 95% identical, at least about 96% identical, at least about 97% identical, at least about 98% identical, at least about 99% identical, at least about 99.5% identical, or at least about 99.9% to the corresponding fragment of wild type VPR or a VPR as set forth in SEQ ID NO: 293. In some embodiments, the VPR comprises the amino acid sequence set forth in SEQ ID NO: 293. In some embodiments, the VPR comprises an amino acid sequence encoded by the nucleotide sequence set forth in SEQ ID NO: 292.

[0181] In some embodiments, a VPR is a VP64-SV40-P65-RTA triple activator. In some embodiments, the VP64-SV40-P65-RTA comprises a VP64-SV40-P65-RTA as set forth in SEQ ID NO: 295. In some embodiments, the VP64-SV40-P65-RTA proteins provided herein include fragments of VP64-SV40-P65-RTA and proteins homologous to a VP64-SV40-P65-RTA or a VP64-SV40-P65-RTA fragment. For example, in some embodiments, a VP64-SV40-P65-RTA comprises a fragment of the amino acid sequence set forth in SEQ ID NO: 295. In some embodiments, a VP64-SV40-P65-RTA comprises an amino acid sequence homologous to the amino acid sequence set forth in SEQ ID NO: 295 or an amino acid sequence homologous to a fragment of the amino acid sequence set forth in SEQ ID NO: 295. In some embodiments, proteins comprising VP64-SV40-P65-RTA or fragments of VP64-SV40-P65-RTA or homologs of VP64-SV40-P65-RTA or VP64-SV40-P65-RTA fragments are referred to as “VP64-SV40-P65-RTA variants.” A VP64-SV40-P65-RTA variant shares homology to VP64-SV40-P65-RTA, or a fragment thereof. For example a VP64-SV40-P65-RTA variant is at least about 70% identical, at least about 80% identical, at least about 90% identical, at least about 95% identical, at least about 96% identical, at least about 97% identical, at least about 98% identical, at least about 99% identical, at least about 99.5% identical, or at least about 99.9% to a VP64-SV40-P65-RTA as set forth in SEQ ID NO: 295. In some embodiments, the VP64-SV40-P65-RTA variant comprises a fragment of VP64-SV40-P65-RTA, such that the fragment is at least about 70% identical, at least about 80% identical, at least about 90% identical, at least about 95% identical, at least about 96% identical, at least about 97% identical, at least about 98% identical, at least about 99% identical, at least about 99.5% identical, or at least about 99.9% to the corresponding fragment of a VP64-SV40-P65-RTA as set forth in SEQ ID NO: 295. In some embodiments, the VP64-SV40-P65-RTA comprises the amino acid sequence set forth in SEQ ID NO: 295. In some embodiments, the VP64-SV40-P65-RTA comprises an amino acid sequence encoded by the nucleotide sequence set forth in SEQ ID NO: 294.

[0182] Some aspects of this disclosure provide fusion proteins comprising (i) a Cas9 protein; and (ii) a effector domain. In some aspects, the fusion proteins provided herein further include (iii) a DNA-binding protein, for example, a zinc-finger domain, a TALE, or a second Cas9 protein. Without wishing to be bound by any particular theory, fusing a DNA-binding protein (e.g., a second Cas9 protein) to a fusion protein comprising (i) a protein; and (ii) a effector domain may be useful for improving specificity of the fusion protein to a target nucleic acid sequence, or for improving specificity or binding affinity of the fusion protein to bind a target nucleic acid sequence that does not contain the canonical PAM (5′-NGG-3′) sequence. In some embodiments, the second Cas9 protein is any of the Cas9 proteins provided herein. In some embodiments, the second Cas9 protein is fused to the fusion protein N-terminal to the Cas9 protein. In some embodiments, the second Cas9 protein is fused to the fusion protein C-terminal to the Cas9 protein. In some embodiments, the Cas9 protein and the second Cas9 protein are fused via a linker.

[0183] Further provided herein are complexes comprising any of the fusion proteins provided herein, a first guide RNA bound to the Cas9 protein of the fusion protein, and a second guide RNA bound to the second Cas9 protein of the fusion protein. In some embodiments, the first guide RNA is about 15-100 nucleotides long and comprises a sequence of at least 10 contiguous nucleotides that is complementary to a first target sequence and the second guide RNA is about 15-100 nucleotides long and comprises a sequence of at least 10 contiguous nucleotides that is complementary to a second target sequence. In some embodiments, the first guide RNA and/or the second guide RNA is 15, 16, 17, 18, 19, 20, 21, 22, 23, 24, 25, 26, 27, 28, 29, 30, 31, 32, 33, 34, 35, 36, 37, 38, 39, 40, 41, 42, 43, 44, 45, 46, 47, 48, 49, or 50 nucleotides long. In some embodiments, the first guide RNA and the second guide RNA are different. In some embodiments, the first guide RNA comprises a sequence of 15, 16, 17, 18, 19, 20, 21, 22, 23, 24, 25, 26, 27, 28, 29, 30, 31, 32, 33, 34, 35, 36, 37, 38, 39, or 40 contiguous nucleotides that is complementary to a first target sequence, and wherein the second guide RNA comprises a sequence of 15, 16, 17, 18, 19, 20, 21, 22, 23, 24, 25, 26, 27, 28, 29, 30, 31, 32, 33, 34, 35, 36, 37, 38, 39, or 40 contiguous nucleotides that is complementary to a second target sequence. In some embodiments, the first target sequence and the second target sequence are different. In some embodiments, the first target sequence and the second target sequence are DNA sequences. In some embodiments, the first target sequence and the second target sequence are in the genome of a mammal. In some embodiments, the first target sequence and the second target sequence are in the genome of a human. In some embodiments, the first target sequence is within 30 nucleotides of the second target sequence. In some embodiments, the 3′ end of the first target sequence is not immediately adjacent to the canonical PAM sequence (5′-NGG-3′). In some embodiments, the 3′ end of the second target sequence is not immediately adjacent to the canonical PAM sequence (5′-NGG-3′).

[0184] In some embodiments, the general architecture of exemplary Cas9 fusion proteins provided herein is of the structure:
[0185] [NH₂]-[effector domain]-[Cas9]-[second Cas9 protein]-[COOH];
[0186] [NH₂]-[second Cas9 protein]-[Cas9]-[effector domain]-[COOH];
[0187] [NH₂]-[Cas9]-[effector domain]-[second Cas9 protein]-[COOH];
[0188] [NH₂]-[second Cas9 protein]-[effector or domain]-[Cas9]-[COOH];
[0189] [NH₂]-[UGI]-[effector domain]-[Cas9]-[second Cas9 protein]-[COOH];
[0190] [NH₂]-[UGI]-[second Cas9 protein]-[Cas9]-[effector domain]-[COOH];
[0191] [NH₂]-[UGI]-[Cas9]-[effector domain]-[second Cas9 protein]-[COOH];
[0192] [NH₂]-[UGI]-[second Cas9 protein]-[effector domain]-[Cas9]-[COOH];
[0193] [NH₂]-[effector domain]-[Cas9]-[second Cas9 protein]-[UGI]-[COOH];
[0194] [NH₂]-[second Cas9 protein]-[Cas9]-[effector domain]-[UGI]-[COOH];
[0195] [NH₂]-[Cas9]-[effector domain]-[second Cas9 protein]-[UGI]-[COOH]; or
[0196] [NH₂]-[second Cas9 protein]-[effector domain]-[Cas9]-[UGI]-[COOH];
   wherein NH₂ is the N-terminus of the fusion protein, and COOH is the C-terminus of the fusion protein. In some embodiments, the “]-[” used in the general architecture above indicates the presence of an optional linker sequence. In other examples, the general architecture of exemplary Cas9 fusion proteins provided herein is of the structure:
[0197] [NH₂]-[effector domain]-[Cas9]-[second Cas9 protein]-[COOH];
[0198] [NH₂]-[second Cas9 protein]-[Cas9]-[effector domain]-[COOH];
[0199] [NH₂]-[Cas9]-[effector domain]-[second Cas9 protein]-[COOH];
[0200] [NH₂]-[second Cas9 protein]-[effector domain]-[Cas9]-[COOH];
[0201] [NH₂]-[UGI]-[effector domain]-[Cas9]-[second Cas9 protein]-[COOH],
[0202] [NH₂]-[UGI]-[second Cas9 protein]-[Cas9]-[effector domain]-[COOH];
[0203] [NH₂]-[UGI]-[Cas9]-[effector domain]-[second Cas9 protein]-[COOH];
[0204] [NH₂]-[UGI]-[second Cas9 protein]-[effector domain]-[Cas9]-[COOH];
[0205] [NH₂]-[effector domain]-[Cas9]-[second Cas9 protein]-[UGI]-[COOH];
[0206] [NH₂]-[second Cas9 protein]-[Cas9]-[effector domain]-[UGI]-[COOH];
[0207] [NH₂]-[Cas9]-[effector domain]-[second Cas9 protein]-[UGI]-[COOH]; or
[0208] [NH₂]-[second Cas9 protein]-[effector domain]-[Cas9]-[UGI]-[COOH];
   wherein NH₂ is the N-terminus of the fusion protein, and COOH is the C-terminus of the fusion protein. In some embodiments, the “-” used in the general architecture above indicates the presence of an optional linker sequence. In some embodiments, the second Cas9 is a dCas9 protein. In some examples, the general architecture of exemplary Cas9 fusion proteins provided herein comprises a structure as shown in FIG. 8. It should be appreciated that any of the proteins provided in any of the general architectures of exemplary Cas9 fusion proteins may be connected by one or more of the linkers provided herein. In some embodiments, the linkers are the same. In some embodiments, the linkers are different. In some embodiments, one or more of the proteins provided in any of the general architectures of exemplary Cas9 fusion proteins are not fused via a linker. In some embodiments, the fusion proteins further comprise a nuclear targeting sequence, for example a nuclear localization sequence. In some embodiments, fusion proteins provided herein further comprise a nuclear localization sequence (NLS). In some embodiments, the NLS is fused to the N-terminus of the fusion protein. In some embodiments, the NLS is fused to the C-terminus of the fusion protein. In some embodiments, the NLS is fused to the N-terminus of the second Cas9 protein. In some embodiments, the NLS is fused to the C-terminus of the second Cas9 protein. In some embodiments, the NLS is fused to the N-terminus of the Cas9 protein. In some embodiments, the NLS is fused to the C-terminus of the Cas9 protein. In some embodiments, the NLS is fused to the N-terminus of the effector domain. In some embodiments, the NLS is fused to the C-terminus of the effector domain. In some embodiments, the NLS is fused to the N-terminus of the UGI protein. In some embodiments, the NLS is fused to the C-terminus of the UGI protein. In some embodiments, the NLS is fused to the fusion protein via one or more linkers. In some embodiments, the NLS is fused to the fusion protein without a linker.

### Uracil Glycosylase Inhibitor Fusion Proteins

[0209] Some aspects of this disclosure provide fusion proteins comprising a Cas9 protein fused to a effector domain, e.g., a deaminase, and a uracil glycosylase inhibitor (UGI). In some embodiments, the fusion protein comprises the structure:
[0210] [deaminase]-[optional linker sequence]-[Cas9]-[optional linker sequence]-[UGI];
[0211] [deaminase]-[optional linker sequence]-[UGI]-[optional linker sequence]-[Cas9];
[0212] [UGI]-[optional linker sequence]-[deaminase]-[optional linker sequence]-[Cas9];
[0213] [UGI]-[optional linker sequence]-[Cas9]-[optional linker sequence]-[deaminase];
[0214] [Cas9]-[optional linker sequence]-[deaminase]-[optional linker sequence]-[UGI]; or
[0215] [Cas9]-[optional linker sequence]-[UGI]-[optional linker sequence]-[deaminase].
   In some embodiments, the fusion proteins do not comprise a linker sequence. In some embodiments, one or both of the optional linker sequences are present.

[0216] In some embodiments, the fusion protein further comprises a second Cas9 protein. For example, the second Cas9 protein may be any of the Cas9 proteins provided herein. In some embodiments, fusion protein comprises the structure:
[0217] [deaminase]-[Cas9]-[UGI]; [deaminase]-[UGI]-[Cas9];
[0218] [UGI]-[deaminase]-[Cas9];
[0219] [UGI]-[Cas9]-[deaminase];
[0220] [Cas9]-[deaminase]-[UGI];
[0221] [Cas9]-[UGI]-[deaminase];
[0222] [second Cas9]-[deaminase]-[Cas9]-[UGI];
[0223] [second Cas9]-[deaminase]-[UGI]-[Cas9];
[0224] [second Cas9]-[UGI]-[deaminase]-[Cas9];
[0225] [second Cas9]-[UGI]-[Cas9]-[deaminase];
[0226] [second Cas9]-[Cas9]-[deaminase]-[UGI];
[0227] [second Cas9]-[Cas9]-[UGI]-[deaminase];
[0228] [deaminase]-[second Cas9]-[Cas9]-[UGI];
[0229] [deaminase]-[second Cas9]-[UGI]-[Cas9];
[0230] [UGI]-[second Cas9]-[deaminase]-[Cas9];
[0231] [UGI]-[second Cas9]-[Cas9]-[deaminase];
[0232] [Cas9]-[second Cas9]-[deaminase]-[UGI];
[0233] [Cas9]-[second Cas9]-[UGI]-[deaminase];
[0234] [deaminase]-[Cas9]-[second Cas9]-[UGI];
[0235] [deaminase]-[UGI]-[second Cas9]-[Cas9];
[0236] [UGI]-[deaminase]-[second Cas9]-[Cas9];
[0237] [UGI]-[Cas9]-[second Cas9]-[deaminase];
[0238] [Cas9]-[deaminase]-[second Cas9]-[UGI];
[0239] [Cas9]-[UGI]-[second Cas9]-[deaminase];
[0240] [deaminase]-[Cas9]-[UGI]-[second Cas9];
[0241] [deaminase]-[UGI]-[Cas9]-[second Cas9];
[0242] [UGI]-[deaminase]-[Cas9]-[second Cas9];
[0243] [UGI]-[Cas9]-[deaminase]-[second Cas9];
[0244] [Cas9]-[deaminase]-[UGI]-[second Cas9]; or
[0245] [Cas9]-[UGI]-[deaminase]-[second Cas9].
   In some embodiments, the “-” used in the general architecture above indicates the presence of an optional linker sequence. In some embodiments, the fusion proteins comprising a UGI further comprise a nuclear targeting sequence, for example a nuclear localization sequence. In some embodiments, fusion proteins provided herein further comprise a nuclear localization sequence (NLS). In some embodiments, the NLS is fused to the N-terminus of the fusion protein. In some embodiments, the NLS is fused to the C-terminus of the fusion protein. In some embodiments, the NLS is fused to the N-terminus of the UGI protein. In some embodiments, the NLS is fused to the C-terminus of the UGI protein. In some embodiments, the NLS is fused to the N-terminus of the Cas9 protein. In some embodiments, the NLS is fused to the C-terminus of the Cas9 protein. In some embodiments, the NLS is fused to the N-terminus of the deaminase. In some embodiments, the NLS is fused to the C-terminus of the deaminase. In some embodiments, the NLS is fused to the N-terminus of the second Cas9. In some embodiments, the NLS is fused to the C-terminus of the second Cas9. In some embodiments, the NLS is fused to the fusion protein via one or more linkers. In some embodiments, the NLS is fused to the fusion protein without a linker.

[0246] In some embodiments, the UGI comprises a wild type UGI or a UGI as set forth in SEQ ID NO: 553. In some embodiments, the UGI proteins provided herein include fragments of UGI and proteins homologous to a UGI or a UGI fragment. For example, in some embodiments, a UGI comprises a fragment of the amino acid sequence set forth in SEQ ID NO: 553. In some embodiments, a UGI comprises an amino acid sequence homologous to the amino acid sequence set forth in SEQ ID NO: 553 or an amino acid sequence homologous to a fragment of the amino acid sequence set forth in SEQ ID NO: 553. In some embodiments, proteins comprising UGI or fragments of UGI or homologs of UGI or UGI fragments are referred to as “UGI variants.” A UGI variant shares homology to UGI, or a fragment thereof. For example a UGI variant is at least about 70% identical, at least about 80% identical, at least about 90% identical, at least about 95% identical, at least about 96% identical, at least about 97% identical, at least about 98% identical, at least about 99% identical, at least about 99.5% identical, or at least about 99.9% to a wild type UGI or a UGI as set forth in SEQ ID NO: 553. In some embodiments, the UGI variant comprises a fragment of UGI, such that the fragment is at least about 70% identical, at least about 80% identical, at least about 90% identical, at least about 95% identical, at least about 96% identical, at least about 97% identical, at least about 98% identical, at least about 99% identical, at least about 99.5% identical, or at least about 99.9% to the corresponding fragment of wild type UGI or a UGI as set forth in SEQ ID NO: 553. In some embodiments, the UGI comprises the following amino acid sequence:

>sp|P14739|UNGI_BPPB2 Uracil-DNA glycosylase
inhibitor
(SEQ ID NO: 553)
MTNLSDIIEKETGKQLVIQESILMLPEEVEEVIGNKPESDILVHTAYDES
TDENVMLLTSDAPEYKPWALVIQDSNGENKIKML

[0247] Suitable UGI protein and nucleotide sequences are provided herein and additional suitable UGI sequences are known to those in the art, and include, for example, those published in Wang et al., Uracil-DNA glycosylase inhibitor gene of bacteriophage PBS2 encodes a binding protein specific for uracil-DNA glycosylase. J. Biol. Chem. 264:1163-1171 (1989); Lundquist et al., Site-directed mutagenesis and characterization of uracil-DNA glycosylase inhibitor protein. Role of specific carboxylic amino acids in complex formation with Escherichia coli uracil-DNA glycosylase. J. Biol. Chem. 272:21408-21419 (1997); Ravishankar et al., X-ray analysis of a complex of Escherichia coli uracil DNA glycosylase (EcUDG) with a proteinaceous inhibitor. The structure elucidation of a prokaryotic UDG. Nucleic Acids Res. 26:4880-4887 (1998); and Putnam et al., Protein mimicry of DNA from crystal structures of the uracil-DNA glycosylase inhibitor protein and its complex with Escherichia coli uracil-DNA glycosylase. J. Mol. Biol. 287:331-346 (1999), the entire contents of each are incorporated herein by reference.

[0248] It should be appreciated that additional proteins may be uracil glycosylase inhibitors. For example, other proteins that are capable of inhibiting (e.g., sterically blocking) a uracil-DNA glycosylase base-excision repair enzyme are within the scope of this disclosure. In some embodiments, a uracil glycosylase inhibitor is a protein that binds DNA. In some embodiments, a uracil glycosylase inhibitor is a protein that binds single-stranded DNA. For example, a uracil glycosylase inhibitor may be a Erwinia tasmaniensis single-stranded binding protein. In some embodiments, the single-stranded binding protein comprises the amino acid sequence (SEQ ID NO: 303). In some embodiments, a uracil glycosylase inhibitor is a protein that binds uracil. In some embodiments, a uracil glycosylase inhibitor is a protein that binds uracil in DNA. In some embodiments, a uracil glycosylase inhibitor is a catalytically inactive uracil DNA-glycosylase protein. In some embodiments, a uracil glycosylase inhibitor is a catalytically inactive uracil DNA-glycosylase protein that does not excise uracil from the DNA. For example, a uracil glycosylase inhibitor is a UdgX. In some embodiments, the UdgX comprises the amino acid sequence (SEQ ID NO: 304). As another example, a uracil glycosylase inhibitor is a catalytically inactive UDG. In some embodiments, a catalytically inactive UDG comprises the amino acid sequence (SEQ ID NO: 305). It should be appreciated that other uracil glycosylase inhibitors would be apparent to the skilled artisan and are within the scope of this disclosure.

Erwinia tasmaniensis SSB (themostable single-stranded DNA binding protein)
(SEQ ID NO: 303)
MASRGVNKVILVGNLGQDPEVRYMPNGGAVANITLATSESWRDKQTGETKEKTEWHR
VVLFGKLAEVAGEYLRKGSQVYIEGALQTRKWTDQAGVEKYTTEVVVNVGGTMQML
GGRSQGGGASAGGQNGGSNNGWGQPQQPQGGNQFSGGAQQQARPQQQPQQNNAPAN
NEPPIDFDDDIP
UdgX (binds to Uracil in DNA but does not excise)
(SEQ ID NO: 304)
MAGAQDFVPHTADLAELAAAAGECRGCGLYRDATQAVFGAGGRSARIMMIGEQPGDK
EDLAGLPFVGPAGRLLDRALEAADIDRDALYVTNAVKHFKFTRAAGGKRRIHKTPSRTE
VVACRPWLIAEMTSVEPDVVVLLGATAAKALLGNDFRVTQHRGEVLHVDDVPGDPAL
VATVHPSSLLRGPKEERESAFAGLVDDLRVAADVRP
UDG (catalytically inactive human UDG, binds to Uracil in DNA but does not excise)
(SEQ ID NO: 305)
MIGQKTLYSFFSPSPARKRHAPSPEPAVQGTGVAGVPEESGDAAAIPAKKAPAGQEEPGT
PPSSPLSAEQLDRIQRNKAAALLRLAARNVPVGFGESWKKHLSGEFGKPYFIKLMGFVA
EERKHYTVYPPPHQVFTWTQMCDIKDVKVVILGQEPYHGPNQAHGLCFSVQRPVPPPPS
LENIYKELSTDIEDFVHPGHGDLSGWAKQGVLLLNAVLTVRAHQANSHKERGWEQFTD
AVVSWLNQNSNGLVFLLWGSYAQKKGSAIDRKRHHVLQTAHPSPLSVYRGFFGCRHFS
KTNELLQKSGKKPIDWKEL

### High Fidelity Cas9

[0249] Some aspects of the disclosure provide high fidelity Cas9 proteins. In some embodiments, high fidelity Cas9 proteins have decreased electrostatic interactions between the Cas9 protein and a sugar-phosphate backbone of a DNA, as compared to a wild-type Cas9 domain. In some embodiments, any of the Cas9 proteins provided herein comprise one or more mutations that decrease the association between the Cas9 protein and a sugar-phosphate backbone of a DNA. In some embodiments, any of the Cas9 proteins provided herein comprise one or more mutations that decrease the association between the Cas9 protein and a sugar-phosphate backbone of a DNA by at least 5%, at least 10%, at least 15%, at least 20%, at least 25%, at least 30%, at least 35%, at least 40%, at least 45%, at least 50%, at least 60%, at least 70%, at least 80%, at least 90%, or at least 95%. In some embodiments, any of the Cas9 proteins provided herein comprise one or more of a N497X, a R661X, a Q695X, and/or a Q926X mutation of the amino acid sequence provided in SEQ ID NO: 9, or a corresponding mutation in any of the amino acid sequences provided in SEQ ID NOs: 10-262, wherein X is any amino acid. In some embodiments, any of the Cas9 proteins provided herein comprise one or more of a N497A, a R661A, a Q695A, and/or a Q926A mutation of the amino acid sequence provided in SEQ ID NO: 9, or a corresponding mutation in any of the amino acid sequences provided in SEQ ID NOs: 10-262. In some embodiments, the Cas9 protein comprises a D10A mutation of the amino acid sequence provided in SEQ ID NO: 9, or a corresponding mutation in any of the amino acid sequences provided in SEQ ID NOs: 10-262. In some embodiments, the Cas9 protein comprises the amino acid sequence as set forth in SEQ ID NO: 306. High fidelity Cas9 proteins have been described in the art and would be apparent to the skilled artisan. For example, high fidelity Cas9 proteins have been described in Kleinstiver, B. P., et al. “High-fidelity CRISPR-Cas9 nucleases with no detectable genome-wide off-target effects.” Nature 529, 490-495 (2016); and Slaymaker, I. M., et al. “Rationally engineered Cas9 nucleases with improved specificity.” Science 351, 84-88 (2015); the entire contents of each are incorporated herein by reference. It should be appreciated that, based on the present disclosure and knowledge in the art, that mutations in any Cas9 protein may be generated to make high fidelity Cas9 proteins that have decreased electrostatic interactions between the Cas9 protein and a sugar-phosphate backbone of a DNA, as compared to a wild-type Cas9 domain.

[0250] Cas9 domain where mutations relative to Cas9 of SEQ ID NO: 9 are shown in bold and underlines.

(SEQ ID NO: 306)
MDKKYSIGLDIGTNSVGWAVITDEYKVPSKKFKVLGNTDRHSIKKNLIGALLFDSGETA
EATRLKRTARRRYTRRKNRICYLQEIFSNEMAKVDDSFFHRLEESFLVEEDKKHERHPIF
GNIVDEVAYHEKYPTIYHLRKKLVDSTDKADLRLIYLALAHMIKFRGHFLIEGDLNPDNS
DVDKLFIQLVQTYNQLFEENPINASGVDAKAILSARLSKSRRLENLIAQLPGEKKNGLFG
NLIALSLGLTPNFKSNFDLAEDAKLQLSKDTYDDDLDNLLAQIGDQYADLFLAAKNLSD
AILLSDILRVNTEITKAPLSASMIKRYDEHHQDLTLLKALVRQQLPEKYKEIFFDQSKNGY
AGYIDGGASQEEFYKFIKPILEKMDGTEELLVKLNREDLLRKQRTFDNGSIPHQIHLGEL
HAILRRQEDFYPFLKDNREKIEKILTFRIPYYVGPLARGNSRFAWMTRKSEETITPWNFEE
VVDKGASAQSFIERMTAFDKNLPNEKVLPKHSLLYEYFTVYNELTKVKYVTEGMRKPA
FLSGEQKKAIVDLLFKTNRKVTVKQLKEDYFKKIECFDSVEISGVEDRFNASLGTYHDLL
KIIKDKDFLDNEENEDILEDIVLTLTLFEDREMIEERLKTYAHLFDDKVMKQLKRRRYTG
WGALSRKLINGIRDKQSGKTILDFLKSDGFANRNFMALIHDDSLTFKEDIQKAQVSGQG
DSLHEHIANLAGSPAIKKGILQTVKVVDELVKVMGRHKPENIVIEMARENQTTQKGQKN
SRERMKRIEEGIKELGSQILKEHPVENTQLQNEKLYLYYLQNGRDMYVDQELDINRLSD
YDVDHIVPQSFLKDDSIDNKVLTRSDKNRGKSDNVPSEEVVKKMKNYWRQLLNAKLIT
QRKFDNLTKAERGGLSELDKAGFIKRQLVETRAITKHVAQILDSRMNTKYDENDKLIRE
VKVITLKSKLVSDFRKDFQFYKVREINNYHHAHDAYLNAVVGTALIKKYPKLESEFVYG
DYKVYDVRKMIAKSEQEIGKATAKYFFYSNIMNFFKTEITLANGEIRKRPLIETNGETGEI
VWDKGRDFATVRKVLSMPQVNIVKKTEVQTGGFSKESILPKRNSDKLIARKKDWDPKK
YGGFDSPTVAYSVLVVAKVEKGKSKKLKSVKELLGITIMERSSFEKNPIDFLEAKGYKE
VKKDLIIKLPKYSLFELENGRKRMLASAGELQKGNELALPSKYVNFLYLASHYEKLKGS
PEDNEQKQLFVEQHKHYLDEIIEQISEFSKRVILADANLDKVLSAYNKHRDKPIREQAENI
IHLFTLTNLGAPAAFKYFDTTIDRKRYTSTKEVLDATLIHQSITGLYETRIDLSQLGGD

Cas9 Proteins with Reduced PAM Exclusivity

[0251] Some aspects of the disclosure provide Cas9 proteins that have different PAM specificities. Typically, Cas9 proteins, such as Cas9 from S. pyogenes (spCas9), require a canonical NGG PAM sequence to bind a particular nucleic acid region. This may limit the ability to of the Cas9 protein to bind to a particular nucleotide sequence within a genome. Accordingly, in some embodiments, any of the Cas proteins provided herein may be capable of binding a nucleotide sequence that does not contain a canonical (e.g., NGG) PAM sequence. For example, Cas9 proteins that bind non-canonical PAM sequences have been described in Kleinstiver, B. P., et al., “Engineered CRISPR-Cas9 nucleases with altered PAM specificities” Nature 523, 481-485 (2015); and Kleinstiver, B. P., et al., “Broadening the targeting range of Staphylococcus aureus CRISPR-Cas9 by modifying PAM recognition” Nature Biotechnology 33, 1293-1298 (2015); the entire contents of each are hereby incorporated by reference.

[0252] In some embodiments, the Cas9 protein is a Cas9 protein from Staphylococcus aureus (SaCas9). In some embodiments, the SaCas9 protein is a nuclease active SaCas9, a nuclease inactive SaCas9 (SaCas9d), or a SaCas9 nickase (SaCas9n). In some embodiments, the SaCas9 comprises the amino acid sequence SEQ ID NO: 307. In some embodiments, the SaCas9 comprises a N579X mutation of SEQ ID NO: 307, or a corresponding mutation in any of the amino acid sequences provided in SEQ ID NOs: 9-262, wherein X is any amino acid except for N. In some embodiments, the SaCas9 comprises a N579A mutation of SEQ ID NO: 307, or a corresponding mutation in any of the amino acid sequences provided in SEQ ID NOs: 10-262. In some embodiments, the SaCas9 protein, the SaCas9d protein, or the SaCas9n protein can bind to a nucleic acid sequence having a non-canonical PAM. In some embodiments, the SaCas9 protein, the SaCas9d protein, or the SaCas9n protein can bind to a nucleic acid sequence having a NNGRRT PAM sequence. In some embodiments, the SaCas9 protein comprises one or more of a E781X, N967X, or R1014X mutation of SEQ ID NO: 307, or a corresponding mutation in any of the amino acid sequences provided in SEQ ID NOs: 10-262, wherein X is any amino acid. In some embodiments, the SaCas9 protein comprises one or more of a E781K, N967K, or R1014H mutation of SEQ ID NO: 307, or one or more corresponding mutation in any of the amino acid sequences provided in SEQ ID NOs: 10-262. In some embodiments, the SaCas9 protein comprises a E781K, a N967K, and a R1014H mutation of SEQ ID NO: 307, or corresponding mutations in any of the amino acid sequences provided in SEQ ID NOs: 10-262. It should be appreciated that these mutations may be combined with any of the other mutations provided herein

[0253] In some embodiments, the Cas9 protein of any of the fusion proteins provided herein comprises an amino acid sequence that is at least 60%, at least 65%, at least 70%, at least 75%, at least 80%, at least 85%, at least 90%, at least 95%, at least 96%, at least 97%, at least 98%, at least 99%, or at least 99.5% identical to any one of SEQ ID NOs: 307-309. In some embodiments, the Cas9 protein of any of the fusion proteins provided herein comprises the amino acid sequence of any one of SEQ ID NOs: 307-309. In some embodiments, the Cas9 protein of any of the fusion proteins provided herein consists of the amino acid sequence of any one of SEQ ID NOs: 307-309.

### Exemplary SaCas9 Sequence

(SEQ ID NO: 307)
KRNYILGLDIGITSVGYGIIDYETRDVIDAGVRLFKEANVENNEGRRSKRGARRLKRRRR
HRIQRVKKLLFDYNLLTDHSELSGINPYEARVKGLSQKLSEEEFSAALLHLAKRRGVHN
VNEVEEDTGNELSTKEQISRNSKALEEKYVAELQLERLKKDGEVRGSINRFKTSDYVKE
AKQLLKVQKAYHQLDQSFIDTYIDLLETRRTYYEGPGEGSPFGWKDIKEWYEMLMGHC
TYFPEELRSVKYAYNADLYNALNDLNNLVITRDENEKLEYYEKFQIIENVFKQKKKPTL
KQIAKEILVNEEDIKGYRVTSTGKPEFTNLKVYHDIKDITARKEIIENAELLDQIAKILTIY
QSSEDIQEELTNLNSELTQEEIEQISNLKGYTGTHNLSLKAINLILDELWHTNDNQIAIFNR
LKLVPKKVDLSQQKEIPTTLVDDFILSPVVKRSFIQSIKVINAIIKKYGLPNDIIIELAREKN
SKDAQKMINEMQKRNRQTNERIEEIIRTTGKENAKYLIEKIKLHDMQEGKCLYSLEAIPL
EDLLNNPFNYEVDHIIPRSVSFDNSFNNKVLVKQEENSKKGNRTPFQYLSSSDSKISYETF
KKHILNLAKGKGRISKTKKEYLLEERDINRFSVQKDFINRNLVDTRYATRGLMNLLRSYF
RVNNLDVKVKSINGGFTSFLRRKWKFKKERNKGYKHHAEDALIIANADFIFKEWKKLD
KAKKVMENQMFEEKQAESMPEIETEQEYKEIFITPHQIKHIKDFKDYKYSHRVDKKPNR
ELINDTLYSTRKDDKGNTLIVNNLNGLYDKDNDKLKKLINKSPEKLLMYHHDPQTYQK
LKLIMEQYGDEKNPLYKYYEETGNYLTKYSKKDNGPVIKKIKYYGNKLNAHLDITDDY
PNSRNKVVKLSLKPYRFDVYLDNGVYKFVTVKNLDVIKKENYYEVNSKCYEEAKKLK
KISNQAEFIASFYNNDLIKINGELYRVIGVNNDLLNRIEVNMIDITYREYLENMNDKRPPR
IIKTIASKTQSIKKYSTDILGNLYEVKSKKHPQIIKKG

Residue N579 of SEQ ID NO: 307, which is underlined and in bold, may be mutated (e.g., to a A579) to yield a SaCas9 nickase.
Exemplary SaCas9n sequence

(SEQ ID NO: 308)
KRNYILGLDIGITSVGYGIIDYETRDVIDAGVRLFKEANVENNEGRRSKRGARRLKRRRR
HRIQR VKKLLFDYNLLTDHSELSGINPYEARVKGLSQKLSEEEFSAALLHLAKRRGVHN
VNEVEEDTGNELSTKEQISRNSKALEEKYVAELQLERLKKDGEVRGSINRFKTSDYVKE
AKQLLKVQKAYHQLDQSFIDTYIDLLETRRTYYEGPGEGSPFGWKDIKEWYEMLMGHC
TYFPEELRSVKYAYNADLYNALNDLNNLVITRDENEKLEYYEKFQIIENVFKQKKKPTL
KQIAKEILVNEEDIKGYRVTSTGKPEFTNLKVYHDIKDITARKEIIENAELLDQIAKILTIY
QSSEDIQEELTNLNSELTQEEIEQISNLKGYTGTHNLSLKAINLILDELWHTNDNQIAIFNR
LKLVPKKVDLSQQKEIPTTLVDDFILSPVVKRSFIQSIKVINAIIKKYGLPNDIIIELAREKN
SKDAQKMINEMQKRNRQTNERIEEIIRTTGKENAKYLIEKIKLHDMQEGKCLYSLEAIPL
EDLLNNPFNYEVDHIIPRSVSFDNSFNNKVLVKQEEASKKGNRTPFQYLSSSDSKISYETF
KKHILNLAKGKGRISKTKKEYLLEERDINRFSVQKDFINRNLVDTRYATRGLMNLLRSYF
RVNNLDVKVKSINGGFTSFLRRKWKFKKERNKGYKHHAEDALIIANADFIFKEWKKLD
KAKKVMENQMFEEKQAESMPEIETEQEYKEIFITPHQIKHIKDFKDYKYSHRVDKKPNR
ELINDTLYSTRKDDKGNTLIVNNLNGLYDKDNDKLKKLINKSPEKLLMYHHDPQTYQK
LKLIMEQYGDEKNPLYKYYEETGNYLTKYSKKDNGPVIKKIKYYGNKLNAHLDITDDY
PNSRNKVVKLSLKPYRFDVYLDNGVYKFVTVKNLDVIKKENYYEVNSKCYEEAKKLK
KISNQAEFIASFYNNDLIKINGELYRVIGVNNDLLNRIEVNMIDITYREYLENMNDKRPPR
IIKTIASKTQSIKKYSTDILGNLYEVKSKKHPQIIKKG

[0254] Residue A579 of SEQ ID NO: 308, which can be mutated from N579 of SEQ ID NO: 307 to yield a SaCas9 nickase, is underlined and in bold.

### Exemplary SaKKH Cas9

(SEQ ID NO: 309)
KRNYILGLDIGITSVGYGIIDYETRDVIDAGVRLFKEANVENNEGRRSKRGARRLKRRRR
HRIQRVKKLLFDYNLLTDHSELSGINPYEARVKGLSQKLSEEEFSAALLHLAKRRGVHN
VNEVEEDTGNELSTKEQISRNSKALEEKYVAELQLERLKKDGEVRGSINRFKTSDYVKE
AKQLLKVQKAYHQLDQSFIDTYIDLLETRRTYYEGPGEGSPFGWKDIKEWYEMLMGHC
TYFPEELRSVKYAYNADLYNALNDLNNLVITRDENEKLEYYEKFQIIENVFKQKKKPTL
KQIAKEILVNEEDIKGYRVTSTGKPEFTNLKVYHDIKDITARKEIIENAELLDQIAKILTIY
QSSEDIQEELTNLNSELTQEEIEQISNLKGYTGTHNLSLKAINLILDELWHTNDNQIAIFNR
LKLVPKKVDLSQQKEIPTTLVDDFILSPVVKRSFIQSIKVINAIIKKYGLPNDIIIELAREKN
SKDAQKMINEMQKRNRQTNERIEEIIRTTGKENAKYLIEKIKLHDMQEGKCLYSLEAIPL
EDLLNNPFNYEVDHIIPRSVSFDNSFNNKVLVKQEEASKKGNRTPFQYLSSSDSKISYETF
KKHILNLAKGKGRISKTKKEYLLEERDINRFSVQKDFINRNLVDTRYATRGLMNLLRSYF
RVNNLDVKVKSINGGFTSFLRRKWKFKKERNKGYKHHAEDALIIANADFIFKEWKKLD
KAKKVMENQMFEEKQAESMPEIETEQEYKEIFITPHQIKHIKDFKDYKYSHRVDKKPNR
KLINDTLYSTRKDDKGNTLIVNNLNGLYDKDNDKLKKLINKSPEKLLMYHHDPQTYQK
LKLIMEQYGDEKNPLYKYYEETGNYLTKYSKKDNGPVIKKIKYYGNKLNAHLDITDDY
PNSRNKVVKLSLKPYRFDVYLDNGVYKFVTVKNLDVIKKENYYEVNSKCYEEAKKLK
KISNQAEFIASFYKNDLIKINGELYRVIGVNNDLLNRIEVNMIDITYREYLENMNDKRPPH
IIKTIASKTQSIKKYSTDILGNLYEVKSKKHPQIIKKG

Residue A579 of SEQ ID NO: 309, which can be mutated from N579 of SEQ ID NO: 307 to yield a SaCas9 nickase, is underlined and in bold. Residues K781, K967, and H1014 of SEQ ID NO: 309, which can be mutated from E781, N967, and R1014 of SEQ ID NO: 307 to yield a SaKKH Cas9 are underlined and in italics.

[0255] In some embodiments, the Cas9 protein is a Cas9 protein from Streptococcus pyogenes (SpCas9). In some embodiments, the SpCas9 protein is a nuclease active SpCas9, a nuclease inactive SpCas9 (SpCas9d), or a SpCas9 nickase (SpCas9n). In some embodiments, the SpCas9 comprises the amino acid sequence SEQ ID NO: 9. In some embodiments, the SpCas9 comprises a D10X mutation of SEQ ID NO: 9, or a corresponding mutation in any of the amino acid sequences provided in SEQ ID NOs: 10-262, wherein X is any amino acid except for D. In some embodiments, the SpCas9 comprises a D10A mutation of SEQ ID NO: 9, or a corresponding mutation in any of the amino acid sequences provided in SEQ ID NOs: 10-262. In some embodiments, the SpCas9 protein, the SpCas9d protein, or the SpCas9n protein can bind to a nucleic acid sequence having a non-canonical PAM. In some embodiments, the SpCas9 protein, the SpCas9d protein, or the SpCas9n protein can bind to a nucleic acid sequence having a NGG, a NGA, or a NGCG PAM sequence. In some embodiments, the SpCas9 protein comprises one or more of a D1135X, R1335X, and T1337X mutation of SEQ ID NO: 9, or a corresponding mutation in any of the amino acid sequences provided in SEQ ID NOs: 10-262, wherein X is any amino acid. In some embodiments, the SpCas9 protein comprises one or more of a D1135E, R1335Q, and T1337R mutation of SEQ ID NO: 9, or a corresponding mutation in any of the amino acid sequences provided in SEQ ID NOs: 10-262. In some embodiments, the SpCas9 protein comprises a D1135E, a R1335Q, and a T1335R mutation of SEQ ID NO: 9, or corresponding mutations in any of the amino acid sequences provided in SEQ ID NOs: 10-262. In some embodiments, the SpCas9 protein comprises one or more of a D1135X, R1335X, and T1337X mutation of SEQ ID NO: 9, or a corresponding mutation in any of the amino acid sequences provided in SEQ ID NOs: 10-262, wherein X is any amino acid. In some embodiments, the SpCas9 protein comprises one or more of a D1135V, R1335Q, and T1337R mutation of SEQ ID NO: 9, or a corresponding mutation in any of the amino acid sequences provided in SEQ ID NOs: 10-262. In some embodiments, the SpCas9 protein comprises a D1135V, a R1335Q, and a T1337R mutation of SEQ ID NO: 9, or corresponding mutations in any of the amino acid sequences provided in SEQ ID NOs: 10-262. In some embodiments, the SpCas9 protein comprises one or more of a D1135X, G1218X, R1335X, and T1337X mutation of SEQ ID NO: 9, or a corresponding mutation in any of the amino acid sequences provided in SEQ ID NOs: 10-262, wherein X is any amino acid. In some embodiments, the SpCas9 protein comprises one or more of a D1135V, G1218R, R1335Q, and T1337R mutation of SEQ ID NO: 9, or a corresponding mutation in any of the amino acid sequences provided in SEQ ID NOs: 10-262. In some embodiments, the SpCas9 protein comprises a D1135V, a G1218R, a R1335Q, and a T1337R mutation of SEQ ID NO: 9, or corresponding mutations in any of the amino acid sequences provided in SEQ ID NOs: 10-262. It should be appreciated that these mutations may be combined with any of the other mutations provided herein

[0256] In some embodiments, the Cas9 protein of any of the fusion proteins provided herein comprises an amino acid sequence that is at least 60%, at least 65%, at least 70%, at least 75%, at least 80%, at least 85%, at least 90%, at least 95%, at least 96%, at least 97%, at least 98%, at least 99%, or at least 99.5% identical to any one of SEQ ID NOs: 9, 310-313. In some embodiments, the Cas9 domain of any of the fusion proteins provided herein comprises the amino acid sequence of any one of SEQ ID NOs: 9, 310-313. In some embodiments, the Cas9 domain of any of the fusion proteins provided herein consists of the amino acid sequence of any one of SEQ ID NOs: 9, 310-313.

### Exemplary SpCas9

(SEQ ID NO: 9)
[sequence omitted]

### Exemplary SpCas9n

(SEQ ID NO: 310)
DKKYSIGLAIGTNSVGWAVITDEYKVPSKKFKVLGNTDRHSIKKNLIGALLFDSGETAEA
TRLKRTARRRYTRRKNRICYLQEIFSNEMAKVDDSFFHRLEESFLVEEDKKHERHPIFGN
IVDEVAYHEKYPTIYHLRKKLVDSTDKADLRLIYLALAHMIKFRGHFLIEGDLNPDNSDV
DKLFIQLVQTYNQLFEENPINASGVDAKAILSARLSKSRRLENLIAQLPGEKKNGLFGNLI
ALSLGLTPNFKSNFDLAEDAKLQLSKDTYDDDLDNLLAQIGDQYADLFLAAKNLSDAIL
LSDILRVNTEITKAPLSASMIKRYDEHHQDLTLLKALVRQQLPEKYKEIFFDQSKNGYAG
YIDGGASQEEFYKFIKPILEKMDGTEELLVKLNREDLLRKQRTFDNGSIPHQIHLGELHAI
LRRQEDFYPFLKDNREKIEKILTFRIPYYVGPLARGNSRFAWMTRKSEETITPWNFEEVV
DKGASAQSFIERMTNFDKNLPNEKVLPKHSLLYEYFTVYNELTKVKYVTEGMRKPAFLS
GEQKKAIVDLLFKTNRKVTVKQLKEDYFKKIECFDSVEISGVEDRFNASLGTYHDLLKII
KDKDFLDNEENEDILEDIVLTLTLFEDREMIEERLKTYAHLFDDKVMKQLKRRRYTGWG
RLSRKLINGIRDKQSGKTILDFLKSDGFANRNFMQLIHDDSLTFKEDIQKAQVSGQGDSL
HEHIANLAGSPAIKKGILQTVKVVDELVKVMGRHKPENIVIEMARENQTTQKGQKNSRE
RMKRIEEGIKELGSQILKEHPVENTQLQNEKLYLYYLQNGRDMYVDQELDINRLSDYDV
DHIVPQSFLKDDSIDNKVLTRSDKNRGKSDNVPSEEVVKKMKNYWRQLLNAKLITQRK
FDNLTKAERGGLSELDKAGFIKRQLVETRQITKHVAQILDSRMNTKYDENDKLIREVKVI
TLKSKLVSDFRKDFQFYKVREINNYHHAHDAYLNAVVGTALIKKYPKLESEFVYGDYK
VYDVRKMIAKSEQEIGKATAKYFFYSNIMNFFKTEITLANGEIRKRPLIETNGETGEIVWD
KGRDFATVRKVLSMPQVNIVKKTEVQTGGFSKESILPKRNSDKLIARKKDWDPKKYGG
FDSPTVAYSVLVVAKVEKGKSKKLKSVKELLGITIMERSSFEKNPIDFLEAKGYKEVKK
DLIIKLPKYSLFELENGRKRMLASAGELQKGNELALPSKYVNFLYLASHYEKLKGSPED
NEQKQLFVEQHKHYLDEIIEQISEFSKRVILADANLDKVLSAYNKHRDKPIREQAENIIHL
FTLTNLGAPAAFKYFDTTIDRKRYTSTKEVLDATLIHQSITGLYETRIDLSQLGGD

### Exemplary SpEQR Cas9

(SEQ ID NO: 311)
DKKYSIGLAIGTNSVGWAVITDEYKVPSKKFKVLGNTDRHSIKKNLIGALLFDSGETAEA
TRLKRTARRRYTRRKNRICYLQEIFSNEMAKVDDSFFHRLEESFLVEEDKKHERHPIFGN
IVDEVAYHEKYPTIYHLRKKLVDSTDKADLRLIYLALAHMIKFRGHFLIEGDLNPDNSDV
DKLFIQLVQTYNQLFEENPINASGVDAKAILSARLSKSRRLENLIAQLPGEKKNGLFGNLI
ALSLGLTPNFKSNFDLAEDAKLQLSKDTYDDDLDNLLAQIGDQYADLFLAAKNLSDAIL
LSDILRVNTEITKAPLSASMIKRYDEHHQDLTLLKALVRQQLPEKYKEIFFDQSKNGYAG
YIDGGASQEEFYKFIKPILEKMDGTEELLVKLNREDLLRKQRTFDNGSIPHQIHLGELHAI
LRRQEDFYPFLKDNREKIEKILTFRIPYYVGPLARGNSRFAWMTRKSEETITPWNFEEVV
DKGASAQSFIERMTNFDKNLPNEKVLPKHSLLYEYFTVYNELTKVKYVTEGMRKPAFLS
GEQKKAIVDLLFKTNRKVTVKQLKEDYFKKIECFDSVEISGVEDRFNASLGTYHDLLKII
KDKDFLDNEENEDILEDIVLTLTLFEDREMIEERLKTYAHLFDDKVMKQLKRRRYTGWG
RLSRKLINGIRDKQSGKTILDFLKSDGFANRNFMQLIHDDSLTFKEDIQKAQVSGQGDSL
HEHIANLAGSPAIKKGILQTVKVVDELVKVMGRHKPENIVIEMARENQTTQKGQKNSRE
RMKRIEEGIKELGSQILKEHPVENTQLQNEKLYLYYLQNGRDMYVDQELDINRLSDYDV
DHIVPQSFLKDDSIDNKVLTRSDKNRGKSDNVPSEEVVKKMKNYWRQLLNAKLITQRK
FDNLTKAERGGLSELDKAGFIKRQLVETRQITKHVAQILDSRMNTKYDENDKLIREVKVI
TLKSKLVSDFRKDFQFYKVREINNYHHAHDAYLNAVVGTALIKKYPKLESEFVYGDYK
VYDVRKMIAKSEQEIGKATAKYFFYSNIMNFFKTEITLANGEIRKRPLIETNGETGEIVWD
KGRDFATVRKVLSMPQVNIVKKTEVQTGGFSKESILPKRNSDKLIARKKDWDPKKYGG
FESPTVAYSVLVVAKVEKGKSKKLKSVKELLGITIMERSSFEKNPIDFLEAKGYKEVKKD
LIIKLPKYSLFELENGRKRMLASAGELQKGNELALPSKYVNFLYLASHYEKLKGSPEDNE
QKQLFVEQHKHYLDEIIEQISEFSKRVILADANLDKVLSAYNKHRDKPIREQAENIIHLFT
LTNLGAPAAFKYFDTTIDRKQYRSTKEVLDATLIHQSITGLYETRIDLSQLGGD

Residues E1134, Q1334, and R1336 of SEQ ID NO: 311, which can be mutated from D1134. R1334, and T1336 of SEQ ID NO: 9 to yield a SpEQR Cas9, are underlined and in bold.

### Exemplary SpVQR Cas9

(SEQ ID NO: 312)
DKKYSIGLAIGTNSVGWAVITDEYKVPSKKFKVLGNTDRHSIKKNLIGALLFDSGETAEA
TRLKRTARRRYTRRKNRICYLQEIFSNEMAKVDDSFFHRLEESFLVEEDKKHERHPIFGN
IVDEVAYHEKYPTIYHLRKKLVDSTDKADLRLIYLALAHMIKFRGHFLIEGDLNPDNSDV
DKLFIQLVQTYNQLFEENPINASGVDAKAILSARLSKSRRLENLIAQLPGEKKNGLFGNLI
ALSLGLTPNFKSNFDLAEDAKLQLSKDTYDDDLDNLLAQIGDQYADLFLAAKNLSDAIL
LSDILRVNTEITKAPLSASMIKRYDEHHQDLTLLKALVRQQLPEKYKEIFFDQSKNGYAG
YIDGGASQEEFYKFIKPILEKMDGTEELLVKLNREDLLRKQRTFDNGSIPHQIHLGELHAI
LRRQEDFYPFLKDNREKIEKILTFRIPYYVGPLARGNSRFAWMTRKSEETITPWNFEEVV
DKGASAQSFIERMTNFDKNLPNEKVLPKHSLLYEYFTVYNELTKVKYVTEGMRKPAFLS
GEQKKAIVDLLFKTNRKVTVKQLKEDYFKKIECFDSVEISGVEDRFNASLGTYHDLLKII
KDKDFLDNEENEDILEDIVLTLTLFEDREMIEERLKTYAHLFDDKVMKQLKRRRYTGWG
RLSRKLINGIRDKQSGKTILDFLKSDGFANRNFMQLIHDDSLTFKEDIQKAQVSGQGDSL
HEHIANLAGSPAIKKGILQTVKVVDELVKVMGRHKPENIVIEMARENQTTQKGQKNSRE
RMKRIEEGIKELGSQILKEHPVENTQLQNEKLYLYYLQNGRDMYVDQELDINRLSDYDV
DHIVPQSFLKDDSIDNKVLTRSDKNRGKSDNVPSEEVVKKMKNYWRQLLNAKLITQRK
FDNLTKAERGGLSELDKAGFIKRQLVETRQITKHVAQILDSRMNTKYDENDKLIREVKVI
TLKSKLVSDFRKDFQFYKVREINNYHHAHDAYLNAVVGTALIKKYPKLESEFVYGDYK
VYDVRKMIAKSEQEIGKATAKYFFYSNIMNFFKTEITLANGEIRKRPLIETNGETGEIVWD
KGRDFATVRKVLSMPQVNIVKKTEVQTGGFSKESILPKRNSDKLIARKKDWDPKKYGG
FVSPTVAYSVLVVAKVEKGKSKKLKSVKELLGITIMERSSFEKNPIDFLEAKGYKEVKK
DLIIKLPKYSLFELENGRKRMLASAGELQKGNELALPSKYVNFLYLASHYEKLKGSPED
NEQKQLFVEQHKHYLDEIIEQISEFSKRVILADANLDKVLSAYNKHRDKPIREQAENIIHL
FTLTNLGAPAAFKYFDTTIDRKQYRSTKEVLDATLIHQSITGLYETRIDLSQLGGD

Residues V1134, Q1334, and R1336 of SEQ ID NO: 312, which can be mutated from D1134. R1334, and T1336 of SEQ ID NO: 9 to yield a SpVQR Cas9, are underlined and in bold.

### Exemplary SpVRER Cas9

(SEQ ID NO: 313)
DKKYSIGLAIGTNSVGWAVITDEYKVPSKKFKVLGNTDRHSIKKNLIGALLFDSGETAEA
TRLKRTARRRYTRRKNRICYLQEIFSNEMAKVDDSFFHRLEESFLVEEDKKHERHPIFGN
IVDEVAYHEKYPTIYHLRKKLVDSTDKADLRLIYLALAHMIKFRGHFLIEGDLNPDNSDV
DKLFIQLVQTYNQLFEENPINASGVDAKAILSARLSKSRRLENLIAQLPGEKKNGLFGNLI
ALSLGLTPNFKSNFDLAEDAKLQLSKDTYDDDLDNLLAQIGDQYADLFLAAKNLSDAIL
LSDILRVNTEITKAPLSASMIKRYDEHHQDLTLLKALVRQQLPEKYKEIFFDQSKNGYAG
YIDGGASQEEFYKFIKPILEKMDGTEELLVKLNREDLLRKQRTFDNGSIPHQIHLGELHAI
LRRQEDFYPFLKDNREKIEKILTFRIPYYVGPLARGNSRFAWMTRKSEETITPWNFEEVV
DKGASAQSFIERMTNFDKNLPNEKVLPKHSLLYEYFTVYNELTKVKYVTEGMRKPAFLS
GEQKKAIVDLLFKTNRKVTVKQLKEDYFKKIECFDSVEISGVEDRFNASLGTYHDLLKII
KDKDFLDNEENEDILEDIVLTLTLFEDREMIEERLKTYAHLFDDKVMKQLKRRRYTGWG
RLSRKLINGIRDKQSGKTILDFLKSDGFANRNFMQLIHDDSLTFKEDIQKAQVSGQGDSL
HEHIANLAGSPAIKKGILQTVKVVDELVKVMGRHKPENIVIEMARENQTTQKGQKNSRE
RMKRIEEGIKELGSQILKEHPVENTQLQNEKLYLYYLQNGRDMYVDQELDINRLSDYDV
DHIVPQSFLKDDSIDNKVLTRSDKNRGKSDNVPSEEVVKKMKNYWRQLLNAKLITQRK
FDNLTKAERGGLSELDKAGFIKRQLVETRQITKHVAQILDSRMNTKYDENDKLIREVKVI
TLKSKLVSDFRKDFQFYKVREINNYHHAHDAYLNAVVGTALIKKYPKLESEFVYGDYK
VYDVRKMIAKSEQEIGKATAKYFFYSNIMNFFKTEITLANGEIRKRPLIETNGETGEIVWD
KGRDFATVRKVLSMPQVNIVKKTEVQTGGFSKESILPKRNSDKLIARKKDWDPKKYGG
FVSPTVAYSVLVVAKVEKGKSKKLKSVKELLGITIMERSSFEKNPIDFLEAKGYKEVKK
DLIIKLPKYSLFELENGRKRMLASARELQKGNELALPSKYVNFLYLASHYEKLKGSPED
NEQKQLFVEQHKHYLDEIIEQISEFSKRVILADANLDKVLSAYNKHRDKPIREQAENIIHL
FTLTNLGAPAAFKYFDTTIDRKEYRSTKEVLDATLIHQSITGLYETRIDLSQLGGD

Residues V1134, R1217, Q1334, and R1336 of SEQ ID NO: 313, which can be mutated from D1134, G1217, R1334, and T1336 of SEQ ID NO: 9 to yield a SpVRER Cas9, are underlined and in bold.
Cas9 Complexes with Guide RNAs

[0257] Some aspects of this disclosure provide complexes comprising a Cas9 protein or a Cas9 fusion protein as provided herein, and a guide RNA bound to the Cas9 protein or the Cas9 fusion protein. In some embodiments, the guide RNA is about 15-100 nucleotides long and comprises a sequence of at least 10 contiguous nucleotides that is complementary to a target sequence. In some embodiments, the guide RNA is 15, 16, 17, 18, 19, 20, 21, 22, 23, 24, 25, 26, 27, 28, 29, 30, 31, 32, 33, 34, 35, 36, 37, 38, 39, 40, 41, 42, 43, 44, 45, 46, 47, 48, 49, or 50 nucleotides long. In some embodiments, the guide RNA comprises a sequence of 15, 16, 17, 18, 19, 20, 21, 22, 23, 24, 25, 26, 27, 28, 29, 30, 31, 32, 33, 34, 35, 36, 37, 38, 39, or 40 contiguous nucleotides that is complementary to a target sequence. In some embodiments, the target sequence is a DNA sequence. In some embodiments, the target sequence is a sequence in the genome of a mammal. In some embodiments, the target sequence is a sequence in the genome of a human. In some embodiments, the 3′ end of the target sequence is not immediately adjacent to the canonical PAM sequence (5′-NGG-3′).

[0258] Some aspects of the disclosure provide complexes comprising a first guide RNA bound to a Cas9 protein of a fusion protein, and a second guide RNA bound to a second Cas9 protein of the fusion protein. In some embodiments, the first guide RNA is about 15-100 nucleotides long and comprises a sequence of at least 10 contiguous nucleotides that is complementary to a first target sequence and the second guide RNA is about 15-100 nucleotides long and comprises a sequence of at least 10 contiguous nucleotides that is complementary to a second target sequence. In some embodiments, the first guide RNA and/or the second guide RNA is 15, 16, 17, 18, 19, 20, 21, 22, 23, 24, 25, 26, 27, 28, 29, 30, 31, 32, 33, 34, 35, 36, 37, 38, 39, 40, 41, 42, 43, 44, 45, 46, 47, 48, 49, or 50 nucleotides long. In some embodiments, the first guide RNA and the second guide RNA are different. In some embodiments, the first guide RNA comprises a sequence of 15, 16, 17, 18, 19, 20, 21, 22, 23, 24, 25, 26, 27, 28, 29, 30, 31, 32, 33, 34, 35, 36, 37, 38, 39, or 40 contiguous nucleotides that is complementary to a first target sequence and wherein the second guide RNA comprises a sequence of 15, 16, 17, 18, 19, 20, 21, 22, 23, 24, 25, 26, 27, 28, 29, 30, 31, 32, 33, 34, 35, 36, 37, 38, 39, or 40 contiguous nucleotides that is complementary to a second target sequence.

[0259] In some embodiments, first target sequence and the second target sequence are different. In some embodiments, the first target sequence and the second target sequence are DNA sequences. In some embodiments, the first target sequence and the second target sequence are in the genome of a mammal. In some embodiments, the first target sequence and the second target sequence are in the genome of a human. In some embodiments, the first target sequence is within at least 5, 10, 15, 20, 25, 30, 35, 40, 45, 50, 60, 70, 80, 90, 100, 150, or 200 nucleotides of the second target sequence. In some embodiments, the 3′-end of the first target sequence is not immediately adjacent to the canonical PAM sequence (5′-NGG-3′). In some embodiments, the 3′-end of the second target sequence is not immediately adjacent to the canonical PAM sequence (5′-NGG-3′).

### Methods of Using Cas9 Fusion Proteins

[0260] Some aspects of this disclosure provide methods of using the Cas9 proteins, fusion proteins, or complexes provided herein. For example, some aspects of this disclosure provide methods comprising contacting a DNA molecule (a) with any of the Cas9 proteins or fusion proteins provided herein, and with at least one guide RNA, wherein the guide RNA is about 15-100 nucleotides long and comprises a sequence of at least 10 contiguous nucleotides that is complementary to a target sequence; or (b) with a Cas9 protein, a Cas9 fusion protein, or a Cas9 protein or fusion protein complex with at least one gRNA as provided herein. In some embodiments, the 3′ end of the target sequence is not immediately adjacent to the canonical PAM sequence (5′-NGG-3′). In some embodiments, the 3′ end of the target sequence is immediately adjacent to an AGC, GAG, TTT, GTG, or CAA sequence.

[0261] In some embodiments, the target DNA sequence comprises a sequence associated with a disease or disorder. In some embodiments, the target DNA sequence comprises a point mutation associated with a disease or disorder. In some embodiments, the activity of the Cas9 protein, the Cas9 fusion protein, or the complex results in a correction of the point mutation. In some embodiments, the target DNA sequence comprises a T→C point mutation associated with a disease or disorder, and wherein the deamination of the mutant C base results in a sequence that is not associated with a disease or disorder. In some embodiments, the target DNA sequence encodes a protein and wherein the point mutation is in a codon and results in a change in the amino acid encoded by the mutant codon as compared to the wild-type codon. In some embodiments, the deamination of the mutant C results in a change of the amino acid encoded by the mutant codon. In some embodiments, the deamination of the mutant C results in the codon encoding the wild-type amino acid. In some embodiments, the contacting is in vivo in a subject. In some embodiments, the subject has or has been diagnosed with a disease or disorder. In some embodiments, the disease or disorder is cystic fibrosis, phenylketonuria, epidermolytic hyperkeratosis (EHK), Charcot-Marie-Toot disease type 4J, neuroblastoma (NB), von Willebrand disease (vWD), myotonia congenital, hereditary renal amyloidosis, dilated cardiomyopathy (DCM), hereditary lymphedema, familial Alzheimer's disease, HIV, Prion disease, chronic infantile neurologic cutaneous articular syndrome (CINCA), desmin-related myopathy (DRM), a neoplastic disease associated with a mutant PI3KCA protein, a mutant CTNNB1 protein, a mutant HRAS protein, or a mutant p53 protein.

[0262] Some embodiments provide methods for using the Cas9 DNA editing fusion proteins provided herein. In some embodiments, the fusion protein is used to introduce a point mutation into a nucleic acid by deaminating a target nucleobase, e.g., a C residue. In some embodiments, the deamination of the target nucleobase results in the correction of a genetic defect, e.g., in the correction of a point mutation that leads to a loss of function in a gene product. In some embodiments, the genetic defect is associated with a disease or disorder, e.g., a lysosomal storage disorder or a metabolic disease, such as, for example, type I diabetes. In some embodiments, the methods provided herein are used to introduce a deactivating point mutation into a gene or allele that encodes a gene product that is associated with a disease or disorder. For example, in some embodiments, methods are provided herein that employ a Cas9 DNA editing fusion protein to introduce a deactivating point mutation into an oncogene (e.g., in the treatment of a proliferative disease). A deactivating mutation may, in some embodiments, generate a premature stop codon in a coding sequence, which results in the expression of a truncated gene product, e.g., a truncated protein lacking the function of the full-length protein.

[0263] In some embodiments, the purpose of the methods provide herein is to restore the function of a dysfunctional gene via genome editing. The Cas9 deaminase fusion proteins provided herein can be validated for gene editing-based human therapeutics in vitro, e.g., by correcting a disease-associated mutation in human cell culture. It will be understood by the skilled artisan that the fusion proteins provided herein, e.g., the fusion proteins comprising a Cas9 domain and a nucleic acid deaminase domain can be used to correct any single point T->C or A->G mutation. In the first case, deamination of the mutant C back to U corrects the mutation, and in the latter case, deamination of the C that is base-paired with the mutant G, followed by a round of replication, corrects the mutation.

[0264] An exemplary disease-relevant mutation that can be corrected by the provided fusion proteins in vitro or in vivo is the H1047R (A3140G) polymorphism in the PI3KCA protein. The phosphoinositide-3-kinase, catalytic alpha subunit (PI3KCA) protein acts to phosphorylate the 3-OH group of the inositol ring of phosphatidylinositol. The PI3KCA gene has been found to be mutated in many different carcinomas, and thus it is considered to be a potent oncogene.⁵⁰ In fact, the A3140G mutation is present in several NCI-60 cancer cell lines, such as, for example, the HCT116, SKOV3, and T47D cell lines, which are readily available from the American Type Culture Collection (ATCC).⁵¹

[0265] In some embodiments, a cell carrying a mutation to be corrected, e.g., a cell carrying a point mutation, e.g., an A3140G point mutation in exon 20 of the PI3KCA gene, resulting in a H1047R substitution in the PI3KCA protein, is contacted with an expression construct encoding a Cas9 deaminase fusion protein and an appropriately designed sgRNA targeting the fusion protein to the respective mutation site in the encoding PI3KCA gene. Control experiments can be performed where the sgRNAs are designed to target the fusion enzymes to non-C residues that are within the PI3KCA gene. Genomic DNA of the treated cells can be extracted, and the relevant sequence of the PI3KCA genes PCR amplified and sequenced to assess the activities of the fusion proteins in human cell culture.

[0266] It will be understood that the example of correcting point mutations in PI3KCA is provided for illustration purposes and is not meant to limit the instant disclosure. The skilled artisan will understand that the instantly disclosed DNA-editing fusion proteins can be used to correct other point mutations and mutations associated with other cancers and with diseases other than cancer including other proliferative diseases.

[0267] The successful correction of point mutations in disease-associated genes and alleles opens up new strategies for gene correction with applications in therapeutics and basic research. Site-specific single-base modification systems like the disclosed fusions of Cas9 and deaminase enzymes or domains also have applications in “reverse” gene therapy, where certain gene functions are purposely suppressed or abolished. In these cases, site-specifically mutating Trp (TGG), Gln (CAA and CAG), or Arg (CGA) residues to premature stop codons (TAA, TAG, TGA) can be used to abolish protein function in vitro, ex vivo, or in vivo.

[0268] The instant disclosure provides methods for the treatment of a subject diagnosed with a disease associated with or caused by a point mutation that can be corrected by a Cas9 DNA editing fusion protein provided herein. For example, in some embodiments, a method is provided that comprises administering to a subject having such a disease, e.g., a cancer associated with a PI3KCA point mutation as described above, an effective amount of a Cas9 deaminase fusion protein that corrects the point mutation or introduces a deactivating mutation into the disease-associated gene. In some embodiments, the disease is a proliferative disease. In some embodiments, the disease is a genetic disease. In some embodiments, the disease is a neoplastic disease. In some embodiments, the disease is a metabolic disease. In some embodiments, the disease is a lysosomal storage disease. Other diseases that can be treated by correcting a point mutation or introducing a deactivating mutation into a disease-associated gene will be known to those of skill in the art, and the disclosure is not limited in this respect.

[0269] The instant disclosure provides methods for the treatment of additional diseases or disorders, e.g., diseases or disorders that are associated or caused by a point mutation that can be corrected by deaminase-mediated gene editing. Some such diseases are described herein, and additional suitable diseases that can be treated with the strategies and fusion proteins provided herein will be apparent to those of skill in the art based on the instant disclosure. Exemplary suitable diseases and disorders are listed below. It will be understood that the numbering of the specific positions or residues in the respective sequences depends on the particular protein and numbering scheme used. Numbering might be different, e.g., in precursors of a mature protein and the mature protein itself, and differences in sequences from species to species may affect numbering. One of skill in the art will be able to identify the respective residue in any homologous protein and in the respective encoding nucleic acid by methods well known in the art, e.g., by sequence alignment and determination of homologous residues. Exemplary suitable diseases and disorders include, without limitation, cystic fibrosis (see, e.g., Schwank et al., Functional repair of CFTR by CRISPR/Cas9 in intestinal stem cell organoids of cystic fibrosis patients. Cell stem cell. 2013; 13:653-658; and Wu et. al., Correction of a genetic disease in mouse via use of CRISPR-Cas9. Cell stem cell. 2013; 13:659-662, neither of which uses a deaminase fusion protein to correct the genetic defect); phenylketonuria—e.g., phenylalanine to serine mutation at position 835 (mouse) or 240 (human) or a homologous residue in phenylalanine hydroxylase gene (T>C mutation)—see, e.g., McDonald et al., Genomics. 1997; 39:402-405; Bernard-Soulier syndrome (BSS)—e.g., phenylalanine to serine mutation at position 55 or a homologous residue, or cysteine to arginine at residue 24 or a homologous residue in the platelet membrane glycoprotein IX (T>C mutation)—see, e.g., Noris et al., British Journal of Haematology. 1997; 97:312-320, and Ali et al., Hematol. 2014; 93:381-384; epidermolytic hyperkeratosis (EHK)—e.g., leucine to proline mutation at position 160 or 161 (if counting the initiator methionine) or a homologous residue in keratin 1 (T>C mutation)—see, e.g., Chipev et al., Cell. 1992; 70:821-828, see also accession number P04264 in the UNIPROT database at www[dot]uniprot [dot]org; chronic obstructive pulmonary disease (COPD)—e.g., leucine to proline mutation at position 54 or 55 (if counting the initiator methionine) or a homologous residue in the processed form of a1-antitrypsin or residue 78 in the unprocessed form or a homologous residue (T>C mutation)—see, e.g., Poller et al., Genomics. 1993; 17:740-743, see also accession number P01011 in the UNIPROT database; Charcot-Marie-Toot disease type 4J—e.g., isoleucine to threonine mutation at position 41 or a homologous residue in FIG. 4 (T>C mutation)—see, e.g., Lenk et al., PLOS Genetics. 2011; 7: e1002104; neuroblastoma (NB)—e.g., leucine to proline mutation at position 197 or a homologous residue in Caspase-9 (T>C mutation)—see, e.g., Kundu et al., 3 Biotech. 2013, 3:225-234; von Willebrand disease (vWD)—e.g., cysteine to arginine mutation at position 509 or a homologous residue in the processed form of von Willebrand factor, or at position 1272 or a homologous residue in the unprocessed form of von Willebrand factor (T>C mutation)—see, e.g., Lavergne et al., Br. J. Haematol. 1992, see also accession number P04275 in the UNIPROT database; 82:66-72; myotonia congenital—e.g., cysteine to arginine mutation at position 277 or a homologous residue in the muscle chloride channel gene CLCN1 (T>C mutation)—see, e.g., Weinberger et al., The J. of Physiology. 2012; 590:3449-3464; hereditary renal amyloidosis—e.g., stop codon to arginine mutation at position 78 or a homologous residue in the processed form of apolipoprotein AII or at position 101 or a homologous residue in the unprocessed form (T>C mutation)—see, e.g., Yazaki et al., Kidney Int. 2003; 64:11-16; dilated cardiomyopathy (DCM)—e.g., tryptophan to Arginine mutation at position 148 or a homologous residue in the FOXD4 gene (T>C mutation), see, e.g., Minoretti et. al., Int. J. of Mol. Med. 2007; 19:369-372; hereditary lymphedema—e.g., histidine to arginine mutation at position 1035 or a homologous residue in VEGFR3 tyrosine kinase (A>G mutation), scc, e.g., Irrthum et al., Am. J. Hum. Genet. 2000; 67:295-301; familial Alzheimer's disease—e.g., isoleucine to valine mutation at position 143 or a homologous residue in presenilin1 (A>G mutation), see, e.g., Gallo et. al., J. Alzheimer's disease. 2011; 25:425-431; Prion disease—e.g., methionine to valine mutation at position 129 or a homologous residue in prion protein (A>G mutation)—see, e.g., Lewis et. al., J. of General Virology. 2006; 87:2443-2449; chronic infantile neurologic cutaneous articular syndrome (CINCA)—e.g., Tyrosine to Cysteine mutation at position 570 or a homologous residue in cryopyrin (A>G mutation)—see, e.g., Fujisawa et. al. Blood. 2007; 109:2903-2911; and desmin-related myopathy (DRM)—e.g., arginine to glycine mutation at position 120 or a homologous residue in &B crystallin (A>G mutation)—see, e.g., Kumar et al., J. Biol. Chem. 1999; 274:24137-24141. The entire contents of all references and database entries is incorporated herein by reference.

[0270] The instant disclosure provides lists of genes comprising pathogenic T>C or A>G mutations, which may be corrected using any of the Cas9 fusion proteins provided herein. Provided herein, are the names of these genes, their respective SEQ ID NOs, their gene IDs, and sequences flanking the mutation site. See Tables 4 and 5. Without wishing to be bound by any particular theory, the mutations provided in Tables 4 and 5 may be corrected using the Cas9 fusions provided herein, which are able to bind to target sequences lacking the canonical PAM sequence. In some embodiments, a Cas9-deaminase fusion protein demonstrates activity on non-canonical PAMs and therefore can correct all the pathogenic T>C or A>G mutations listed in Tables 4 and 5 (SEQ ID NOs: 674-2539 and 3144-5083), respectively. In some embodiments, a Cas9-deaminase fusion protein recognizes canonical PAMs and therefore can correct the pathogenic T>C or A>G mutations with canonical PAMs, e.g., 5′-NGG-3′. It should be appreciated that a skilled artisan would understand how to design an RNA (e.g., a gRNA) to target any of the Cas9 proteins or fusion proteins provided herein to any target sequence in order to correct any of the mutations provided herein, for example, the mutations provided in Tables 4 and 5. It will be apparent to those of skill in the art that in order to target a Cas9:effector domain fusion protein as disclosed herein to a target site, e.g., a site comprising a point mutation to be edited, it is typically necessary to co-express the Cas9:effector domain fusion protein together with a guide RNA, e.g., an sgRNA. As explained in more detail elsewhere herein, a guide RNA typically comprises a tracrRNA framework allowing for Cas9 binding, and a guide sequence, which confers sequence specificity to the Cas9:effector domain fusion protein. In some embodiments, the guide RNA comprises a structure 5′-[guide sequence]-guuuuagagcuagaaauagcaaguuaaaauaaaggcuaguccguuaucaacuugaaaaaguggcaccgagucggugcuuuuu-3′ (SEQ ID NO: 285), wherein the guide sequence comprises a sequence that is complementary to the target sequence. The guide sequence is typically 20 nucleotides long. The sequences of suitable guide RNAs for targeting Cas9:effector domain fusion proteins to specific genomic target sites will be apparent to those of skill in the art based on the instant disclosure. Such suitable guide RNA sequences typically comprise guide sequences that are complementary to a nucleic sequence within 50 nucleotides upstream or downstream of the target nucleotide to be edited.

### Kits, Vectors, Cells

[0271] Some aspects of this disclosure provide kits comprising a nucleic acid construct, comprising (a) a nucleotide sequence encoding a Cas9 protein or a Cas9 fusion protein as provided herein; and (b) a heterologous promoter that drives expression of the sequence of (a). In some embodiments, the kit further comprises an expression construct encoding a guide RNA backbone, wherein the construct comprises a cloning site positioned to allow the cloning of a nucleic acid sequence identical or complementary to a target sequence into the guide RNA backbone.

[0272] Some aspects of this disclosure provide polynucleotides encoding a Cas9 protein of a fusion protein as provided herein. Some aspects of this disclosure provide vectors comprising such polynucleotides. In some embodiments, the vector comprises a heterologous promoter driving expression of polynucleotide.

[0273] Some aspects of this disclosure provide cells comprising a Cas9 protein, a fusion protein, a nucleic acid molecule, and/or a vector as provided herein.

[0274] The description of exemplary embodiments of the reporter systems herein is provided for illustration purposes only and not meant to be limiting. Additional reporter systems, e.g., variations of the exemplary systems described in detail above, are also embraced by this disclosure.

### EXAMPLES

### Example 1: PACE Evolution of a Cas9 without PAM Sequence Restriction

[0275] Building PAM Libraries. Four different protospacer target sequences were synthesized: Doench 1-5′-AAGAGAGACAGTACATGCCC-3′ (SEQ ID NO: 286);

[0276] Doench 2-5′-GGAGCCCACCGAGTACCTGG-3′ (SEQ ID NO: 287); G7′-5′-AGTCTCCTCAGCAAAACGAA-3′ (SEQ ID NO: 288); and VEGF Target 2-5′-GACCCCCTCCACCCCGCCTC-3′ (SEQ ID NO: 289). For each protospacer target sequence, a 3′-NNN PAM library was built. While the canonical PAM sequence is 5′-NGG-3′, (e.g., an exemplary [Doench 1]-[canonical PAM] target sequence could be 5′-[AAGAGAGACAGTACATGCCC]-[NGG]-3′ (SEQ ID NO: 291)), the 3′NNN PAM libraries for each protospacer target sequence contained a fully random PAM sequence, e.g., for Doench1 5′-AAGAGAGACAGTACATGCCCNNN-3′ (SEQ ID NO: 290), wherein N represents any nucleotide. The NNN PAM libraries thus included every possible combination of PAM sequences at the 3′ end of the respective protospacer target sequence.

[0277] Testing the Activity of Cas9 on PAM Libraries in a ω-dCas9 luciferase assay. Cas9 activity was tested using a bacterial luciferase activation assay in which a fusion protein of the ω subunit of Escherichia coli RNA polymerase (rpoZ) to dCas9 (see, e.g., Bikard et al., Nucleic Acids Res. 2013 August; 41 (15): 7429-7437) drives the production of luciferase encoded by a nucleic acid under the control of a weak promoter comprising a sequence targeted by an sgRNA. Each PAM library was cloned into a plasmid comprising such a weak promoter, where the [target sequence]-[PAM library] nucleic acid sequences served as the sequence targeted by an sgRNA. A PAM library was cloned into the promoter for The ω-dCas9 assay was run on all four protospacer targets for both the canonical PAM and the random PAM library. FIG. 1 shows the activity of wild-type S. pyogenes Cas9 on PAM Libraries.

[0278] Evolution of Cas9 on PAM Libraries. S. pyogenes dCas9 was fused to the @ unit of RNA polymerase. The resulting ω-dCas9 fusion protein was cloned into an M13 phage-based selection phagemid (SP), comprising the entire M13 phage genome except for a functional version of the gene encoding pIII, a gene essential for the generation of infectious phage particles. The phage gene encoding pIII was provided on a separate plasmid (accessory plasmid, AP), under the control of a promoter that is transcriptionally activated by ω-dCas9. The PAM library was cloned into the promoter region of the accessory plasmid. Host cells used for the directed evolution of Cas9 proteins without PAM restriction were provided that harbored the accessory plasmid. Upon infection with a selection phage, the amount of infectious phage particles produced by a given host cell thus depends on the activity of the ω-dCas9 fusion protein encoded by the selection phage on the promoter of the accessory plasmid, which is required for the production of pIII protein. The accessory plasmid thus confers a selective advantage to those selection phages encoding ω-dCas9 fusion protein variants with an increased activity on different non-canonical PAM sequences.

[0279] A lagoon was provided and a flow of host cells comprising the accessory plasmid was generated through the lagoon. The host cells were contacted with the selection phagemid, resulting in a population of selection phage propagating in the flow of host cells in the lagoon. Phage-infected host cells were removed from the lagoon and fresh, uninfected host cells were fed into the lagoon at a rate resulting in the average time a host cell remained in the lagoon being shorter than the average time between cell division of the host cells, but longer than the average M13 phage life cycle time.

[0280] In order to generate Cas9 variants during a directed evolution experiment, the host cells in the lagoon were incubated under conditions resulting in an increased mutation rate. The host cells were harboring a mutagenesis plasmid (MP), which increased the mutagenesis rate, thus introducing mutations in the ω-dCas9 fusion protein encoded by the selection phagemid during the phage life cycle. Because the flow rate of host cells through the lagoon results in the average time a host cell remains in the lagoon being shorter than the average time between host cell divisions, the host cells in the lagoon cannot accumulate mutations resulting from the increased mutation rate conferred by the mutagenesis plasmid in their genome or on the accessory plasmid. The selection phage, however, replicate in the lagoon in the flow of host cells and thus accumulate mutations over time, resulting in the generation of new, evolved ω-dCas9 fusion protein variants.

[0281] If any of these evolved ω-dCas9 fusion protein variants includes a mutation that confers an increased activity on the accessory plasmid comprising the PAM library, this will directly translate into the generation of more pIII by a host cell infected with a selection phage encoding the respective ω-dCas9 fusion protein variant. The production of more pIII will, in turn, result in the generation of more infectious selection phage particles, which, over time, results in a competitive advantage of the mutant selection phage harboring such beneficial mutations over selection phage not harboring such mutations. After a period of time, the selective pressure exerted by the accessory plasmid will, therefore, result in selection phage having acquired beneficial mutations being the predominant species replicating in the flow of host cells, while selection phage with no mutations or with detrimental mutations will be washed out of the lagoon.

[0282] Because the ω-dCas9 fusion protein activity on the PAM library was very low at the beginning of the experiment, multiple rounds of overnight propagation of the selection phagemid in host cells harboring an accessory plasmid containing the PAM library were carried out to evolve Cas9 variants that show increased activity on noncanonical PAM sequences. At the end of a directed evolution experiment, the evolved population of selection phage was isolated from the lagoon, and a representative number of clones was analyzed to detect Cas9 variants having beneficial mutations. While all mutations observed confer a beneficial phenotype, mutations shared by more than one clone, or by all clones, are of particular interest.

[0283] Mutations from Cas9 PACE. A number of selection phage clones was isolated from a directed evolution experiment using a PAM library accessory plasmid as described above. The mutations identified in the Cas9 amino acid sequence of some exemplary clones is provided below in Table 1 (residue numbering according to SEQ ID NO: 9):

TABLE 1
Cas9 mutations identified in PACE (residue
numbering according to SEQ ID NO: 9.

| Clone | Mutations | | | | |
|---|---|---|---|---|---|
| 1 | | | D182 | | E1219V |
| 2 | | H137 | D182 | | E1219V |
| 3 | | | D182 | G660 | E1219V |
| 4 | I122 | | D182 | | E1219V |

[0284] Clones 1-4 were tested in the ω-dCas9 luciferase activation assay described above. When tested on the PAM library as a whole, the different clones showed an improvement in luciferase expression (FIG. 2—Cas9 activity of exemplary evolved clones on PAM library after directed evolution).

### Improvement of Cas9 Activity on Non-Canonical PAM Sequences.

[0285] The activity of evolved Cas9 proteins on target sequences with noncanonical PAMs was evaluated in more detail. The relative activity of Clone 4, harboring 1122, D182, and E1219V mutations, for various [Doench 2 (5′-GGAGCCCACCGAGTACCTGG-3′ (SEQ ID NO: 287))]-[PAM] target sequences was tested in the ω-dCas9 luciferase activation assay and compared to the activity of wild-type dCas9.

### Improvement of Cas9 Activity on Non-Canonical PAM Sequences.

[0286] The activity of evolved Cas9 proteins on target sequences with noncanonical PAMs was evaluated in more detail. The relative activity of Clone 4, harboring 1122, D182, and E1219V mutations, for various [Doench 2 (5′-GGAGCCCACCGAGTACCTGG-3′ (SEQ ID NO: 287))]-[PAM] target sequences was tested in the ω-dCas9 luciferase activation assay and compared to the activity of wild-type dCas9. The data are shown in Table 2.

TABLE 2
Relative activity of clone 4 on various PAM sequences.

| | Clone 4 dCas9 | Wild-type dCas9 |
|---|---|---|
| PAM | Luciferase Activity | Luciferase Activity |
| GTC | 44.84 | 4.07 |
| AGC | 25.01 | 4.42 |
| GAG | 186.22 | 73.60 |
| TTT | 36.49 | 3.96 |
| GTG | 119.53 | 6.86 |
| AGG | 238.29 | 244.27 |
| CAA | 13.90 | 5.28 |

### Example 2: PACE Evolution of a Cas9 without any PAM Sequence Restriction

[0287] Because the activity of the ω-dCas9 fusion protein on the NNN-PAM libraries was very low, a second round of PACE experiments was performed, in which an initial phase of diversification of the ω-dCas9 fusion protein population was carried out in the absence of selective pressure by providing a source of pIII that did not depend on ω-dCas9 fusion protein activity. The initial diversification stage allows mutations to develop that may not be accessible in a PACE experiment where selective pressure is applied throughout the experiment.

[0288] Selection phage harboring a ω-dCas9 fusion protein with a dCas9 sequence provided as SEQ ID NO: 8 with D10A and H840A mutations was propagated overnight in 1030 host cells together with MP6 mutagenesis plasmid in the presence of arabinose in order to create a library of mutated selection phage encoding a library of ω-dCas9 fusion protein variants. PIII was expressed from a separate plasmid in the host cells during this initial diversification stage. After overnight (12 h) diversification, 1030 host cells harboring an accessory plasmid comprising an NNN PAM library cloned into a weak promoter as the guide RNA target sequence and a mutagenesis plasmid were grown to log phase, and used as the source of host cells to create a flow of host cells through a lagoon. The cells in the lagoon were infected with the diversified selection phage from the overnight incubation. The host cells in the lagoon were contacted with arabinose in order to maintain a high level of expression of the mutagenic genes from the mutagenesis plasmid.

[0289] The initial phage titers were about 10⁸ pfu/mL. A PACE experiment was performed for each of the four NNN-PAM libraries ([Doench 1]-[NNN-PAM], [Doench 2]-[NNN-PAM], [G7]-[NNN-PAM], and [VEGF target]-[NNN-PAM] cloned into an accessory plasmid driving pIII expression from a weak promoter as described above. The phage titers were monitored during the PACE experiments. A slow drop in phage titers to 10⁴ pfu/mL was observed. The phage population was isolated from the lagoon at that point, and grown on 2208 host cells containing a separate source of pIII (psp-driven pIII). After this low-stringency propagation period, a 1:100 dilution of the supernatant was added to fresh host cells harboring the accessory plasmid as the only source of pIII in a new lagoon, and the PACE experiments were continued. No drop in phage titers was observed after this low-stringency incubation in 2208 cells.

[0290] One exemplary PACE experiment that was run for 72 hours. After that period of time, 24 surviving clones were isolated from the lagoon, sequenced, and characterized. The mutations identified included A262T, K294R, S409I, M694I, E480K, E543D, and E1219V (amino acid numbering according to SEQ ID NO: 9). In another exemplary experiment, surviving clones were isolated after 15 days of incubation. Activity of the identified dVas9 mutants was characterized in a ω-dCas9 luciferase assay. Clones with the best ω-dCas9 fusion protein activity on noncanonical PAM target sequences had the following mutations: E480K, E543D, E1219V, and T1329.

[0291] Cas9 Mammalian GFP Activation. Both wild-type dCas9 (SEQ ID NO: 9) and the evolved Cas9 clones were tested in a dCas9-GFP assay in Hek293T cells. The cells were contacted with a reporter construct in which a GFP-encoding sequence was driven from a weak promoter that includes a [gRNA target sequence]-[PAM] sequence. Fusion proteins of dCas9 (wild-type and PACE variants) attached to the transcriptional activator VP64-p65-Rta (VPR) were generated, and the various dCas9-VPR variants were tested for their capacity to activate the GFP reporter in HEK293 cells.

[0292] Hek293T were transfected with four separate plasmids: a dCas9-VPR expression plasmid; a plasmid expressing the sgRNA targeting the gRNA target sequence of the GFP reporter plasmid; the GFP reporter plasmid; and an iRFP transfection control. In one experiment, the HEK293 cells were contacted with a GFP reporter included a TAA PAM, and in another experiment, the HEK293 cells were contacted with a population of reporter plasmids containing an NNN PAM library. Cells were harvested 48 hours after transfection and GFP expressing cells were quantified using a BD LSR-FORTESSA cell analyzer.

[0293] FIG. 3—Cas9 Mammalian GFP Activation. Compared with WT Cas9, the evolved Cas9s showed much higher activity on both the TAA PAM (21.08% vs. 0.60% of cells above negative control) and a library of NNN PAM (22.76% vs. 3.38% of cells above negative control).

Evolved Cas9 Cutting Activity on Target Sequences with Noncanonical PAM.

[0294] In order to demonstrate that the PACE mutations universally confer Cas9 activity without PAM restriction, nuclease-active Cas9 proteins were generated based on the sequence provided in, i.e., without the D10A and H840A mutations, but harboring the various PACE mutations. The evolved Cas9 variants were tested in a Cas9 GFP assay, assessing the capacity of the evolved Cas9 protein variants to target and inactivate an emGFP gene integrated into the genome of HEK293 cells using a guide RNA targeting a sequence with a noncanonical PAM. It was observed that 6.45% of cells showed loss of GFP expression when contacted with a wild-type nuclease-active Cas9 (SEQ ID NO: 9), while 54.55% of cells contacted with the evolved Cas9 (E480K, E543D, E1219V, and T1329) showed a loss of GFP expression.

### Example 3: Cas9 Variants without PAM Restrictions

[0295] The beneficial mutations conferring Cas9 activity on noncanonical PAM sequences were mapped to a S. pyogenes wild-type sequence. Below is an exemplary Cas9 sequence (S. pyogenes Cas9 with D10 and H840 residues marked with an asterisk following the respective amino acid residues, SEQ ID NO: 9). The D10 and H840 residues of SEQ ID NO: 9 may be mutated to generate a nuclease inactive Cas9 (e.g., to D10A and H840A) or to generate a nickase Cas9 (e.g., to D10A with H840; or to D10 with H840A). The HNH domain (bold and underlined) and the RuvC domain (boxed) are identified. The residues found mutated in the clones isolated from the various PACE experiments, amino acid residues 122, 137, 182, 262, 294, 409, 480, 543, 660, 694, 1219, and 1329 are identified with an asterisk following the respective amino acid residue.

(SEQ ID NO: 9)
MDKKYSIGLD*IGTNSVGWAVITDEYKVPSKKFKVLGNTDRHSIKKNLIGALLFDSGETAEATRLKRTARRRYTRRK
NRICYLQEIFSNEMAKVDDSFFHRLEESELVEEDKKHERHPIFGNI*VDEVAYHEKYPTIYH*LRKKLVDSTDKADL
RLIYLALAHMIKFRGHFLIEGDLNPDNSDVD*KLFIQLVQTYNQLFEENPINASGVDAKAILSARLSKSRRLENLIA
QLPGEKKNGLFGNLIALSLGLTPNFKSNFDLAEDA*KLQLSKDTYDDDLDNLLAQIGDQYADLFLAAK*NLSDAILL
SDILRVNTEITKAPLSASMIKRYDEHHQDLTLLKALVRQQLPEKYKEIFFDQSKNGYAGYIDGGASQEEFYKFIKPI
LEKMDGTEELLVKLNREDLLRKORTFDNGS*IPHQIHLGELHAILRRQEDFYPFLKDNREKIEKILTFRIPYYVGPL
ARGNSRFAWMTRKSEETITPWNFEE*VVDKGASAQSFIERMTNFDKNLPNEKVLPKHSLLYEYFTVYNELTKVKYVT
EGMRKPAFLSGE*QKKAIVDLLFKTNRKVTVKOLKEDYFKKIECFDSVEISGVEDRENASLGTYHDLLKIIKDKDEL
DNEENEDILEDIVLTLTLFEDREMIEERLKTYAHLFDDKVMKQLKRRRYTGWG*RLSRKLINGIRDKQSGKTILDEL

[chemical structure]

[chemical structure]

[chemical structure]

[chemical structure]

[chemical structure]

[chemical structure]

LVVAKVEKGKSKKLKSVKELLGITIMERSSFEKNPIDFLEAKGYKEVKKDLIIKLPKYSLFELENGRKRMLASAGE*
LQKGNELALPSKYVNFLYLASHYEKLKGSPEDNEQKQLFVEQHKHYLDEIIEQISEFSKRVILADANLDKVLSAYNK
HRDKPIREQAENIIHLFTLTNLGAPAAFKYFDT*TIDRKRYTSTKEVLDATLIHQSITGLYETRIDLSQLGGD

[0296] The beneficial mutations conferring Cas9 activity on noncanonical PAM sequences were mapped to additional exemplary wild-type Cas9 sequences. The HNH domain (bold and underlined) and the RuvC domain (boxed) are identified. The residues homologous to the residues found mutated in SEQ ID NO: 9, amino acid residues 122, 137, 182, 262, 294, 409, 480, 543, 660, 694, 1219, and 1329 are identified with an asterisk following the respective amino acid residue. In addition, amino acid residues 10 and 840, which are mutated in dCas9 protein variants, are also identified by an asterisk.

(SEQ ID NO: 297)
MDKKYSIGLD*IGTNSVGWAVITDDYKVPSKKFKVLGNTDRHSIKKNLIGALLFGSGETAEATRLKRTARRRYTRRK
NRICYLQEIFSNEMAKVDDSFFHRLEESFLVEEDKKHERHPIFGNI*VDEVAYHEKYPTIYH*LRKKLADSTDKADL
RLIYLALAHMIKFRGHFLIEGDLNPDNSDVD*KLFIQLVQIYNQLFEENPINASRVDAKAILSARLSKSRRLENLIA
QLPGEKRNGLFGNLIALSLGLTPNFKSNFDLAEDA*KLQLSKDTYDDDLDNLLAQIGDQYADLFLAAK*NLSDAILL
SDILRVNSEITKAPLSASMIKRYDEHHQDLTLLKALVRQQLPEKYKEIFFDQSKNGYAGYIDGGASQEEFYKFIKPI
LEKMDGTEELLVKLNREDLLRKORTFDNGS*IPHQIHLGELHAILRRQEDFYPFLKDNREKIEKILTFRIPYYVGPL
ARGNSRFAWMTRKSEETITPWNFEE*VVDKGASAQSFIERMTNFDKNLPNEKVLPKHSLLYEYFTVYNELTKVKYVT
EGMRKPAFLSGE*QKKAIVDLLFKTNRKVTVKOLKEDYFKKIECFDSVEISGVEDRFNASLGAYHDLLKIIKDKDEL
DNEENEDILEDIVLTLTLFEDRGMIEERLKTYAHLFDDKVMKQLKRRRYTGWG*RLSRKLINGIRDKQSGKTILDEL

[chemical structure]

[chemical structure]

[chemical structure]

[chemical structure]

[chemical structure]

[chemical structure]

VVAKVEKGKSKKLKSVKELLGITIMERSSFEKNPIDFLEAKGYKEVKKDLIIKLPKYSLFELENGRKRMLASAGE*L
QKGNELALPSKYVNFLYLASHYEKLKGSPEDNEQKQLFVEQHKHYLDEIIEQISEFSKRVILADANLDKVLSAYNKH
RDKPIREQAENIIHLFTLTNLGAPAAFKYFDT* IDRKRYTSTKEVLDATLIHQSITGLYETRIDLSQLGGD
(SEQ ID NO: 298)
MDKKYSIGLA*IGTNSVGWAVITDEYKVPSKKFKVLGNTDRHSIKKNLIGALLFDSGETAEATRLKRTARRRYTRRK
NRICYLQEIFSNEMAKVDDSFFHRLEESFLVEEDKKHERHPIFGNI*VDEVAYHEKYPTIYH*LRKKLVDSTDKADL
RLIYLALAHMIKFRGHFLIEGDLNPDNSDVD*KLFIQLVQTYNQLFEENPINASGVDAKAILSARLSKSRRLENLIA
QLPGEKKNGLFGNLIALSLGLTPNFKSNFDLAEDA*KLQLSKDTYDDDLDNLLAQIGDQYADLFLAAK*NLSDAILL
SDILRVNTEITKAPLSASMIKRYDEHHQDLTLLKALVRQQLPEKYKEIFFDQSKNGYAGYIDGGASQEEFYKFIKPI
LEKMDGTEELLVKLNREDLLRKORTFDNGS*IPHQIHLGELHAILRRQEDFYPFLKDNREKIEKILTFRIPYYVGPL
ARGNSRFAWMTRKSEETITPWNFEE*VVDKGASAQSFIERMTNFDKNLPNEKVLPKHSLLYEYFTVYNELTKVKYVT
EGMRKPAFLSGE*QKKAIVDLLFKTNRKVTVKQLKEDYFKKIECFDSVEISGVEDRENASLGTYHDLLKIIKDKDEL
DNEENEDILEDIVLTLTLFEDREMIEERLKTYAHLFDDKVMKOLKRRRYTGWG*RLSRKLINGIRDKQSGKTILDEL

[chemical structure]

[chemical structure]

[chemical structure]

[chemical structure]

[chemical structure]

[chemical structure]

LVVAKVEKGKSKKLKSVKELLGITIMERSSFEKNPIDFLEAKGYKEVKKDLIIKLPKYSLFELENGRKRMLASAGE*
LQKGNELALPSKYVNFLYLASHYEKLKGSPEDNEQKQLFVEQHKHYLDEIIEQISEFSKRVILADANLDKVLSAYNK
HRDKPIREQAENIIHLFTLTNLGAPAAFKYFDT*TIDRKRYTSTKEVLDATLIHQSITGLYETRIDLSQLGGD
(SEQ ID NO: 260)
>gi|504540549|ref WP_014727651.1|type II CRISPR RNA-guided endonuclease Cas9
[Streptococcus thermophilus]
MTKPYSIGLD*IGTNSVGWAVITDNYKVPSKKMKVLGNTSKKYIKKNLLGVLLFDSGITAEGRRLKRTARRRYTRRR
NRILYLQEIFSTEMATLDDAFFQRLDDSFLVPDDKRDSKYPIFGNL*VEEKAYHDEFPTIYH*LRKYLADSTKKADL
RLVYLALAHMIKYRGHFLIEGEFNSKNNDIQ*KNFQDFLDTYNAIFESDLSLENSKQLEEIVKDKISKLEKKDRILK
LFPGEKNSGIFSEFLKLIVGNQADFRKCFNLDEKA*SLHFSKESYDEDLETLLGYIGDDYSDVFLKAK*KLYDAILL
SGFLTVTDNETEAPLSSAMIKRYNEHKEDLALLKEYIRNISLKTYNEVFKDDTKNGYAGYIDGKTNQEDFYVYLKNL
LAEFEGADYFLEKIDREDFLRKORTFDNGS*IPYQIHLQEMRAILDKQAKFYPFLAKNKERIEKILTFRIPYYVGPL
ARGNSDFAWSIRKRNEKITPWNFED*VIDKESSAEAFINRMTSFDLYLPEEKVLPKHSLLYETENVYNELTKVRFIA
ESMRDYQFLDSK*QKKDIVRLYFKDKRKVTDKDIIEYLHAIYGYDGIELKGIEKQFNSSLSTYHDLLNIINDKEFLD
DSSNEAIIEEIIHTLTIFEDREMIKQRLSKFENIFDKSVLKKLSRRHYTGWG*KLSAKLINGIRDEKSGNTILDYLI

[chemical structure]

[chemical structure]

IDRLSNYDIDH*IIPQAFLKDNSIDNKVLVSSASNRGKSDDFPSLEVVKKRKTFWYQLLKSKLISQRFDNTLKAER

[chemical structure]

[chemical structure]

[chemical structure]

GYAGISNSFAVLVKGTIEKGAKKKITNVLEFQGISILDRINYRKDKLNFLLEKGYKDIELIIELPKYSLFELSDGSR
RMLASILSTNNKRGE*IHKGNQIFLSQKFVKLLYHAKRISNTINENHRKYVENHKKEFEELFYYILEFNENYVGAKK
NGKLLNSAFQSWQNHSIDELCSSFIGPTGSERKGLFELTSRGSAADFEFLGV*KIPRYRDYTPSSLLKDATLIHQSV
TGLYETRIDLAKLGEG|Staphylococcus Aureus Cas9
(SEQ ID NO: 261)
GSHMKRNYILGLD*IGITSVGYGIIDYETRDVIDAGVRLFKEANVENNEGRRSKRGARRLKRRRRHRIQRVKKLLFD
YNLLTDHSELSGINP*YEARVKGLSQKLSEEEFSAALLHLAKRRGVHNVNEVEEDTGNELST*KEQISRNSKALEEK
YVAELQLERLKKDGEVRGSINRFKTSDYVKEAKQLLKVQKAYHQLDQSFIDTYIDLLETRRTYYEGPGEGSPFGWKD
IKEWYEMLMGHCTYFPEELRSVKYAYNADLYNALNDLNNLVITRDENEKLEYY*EKFQIIENVFKQKKKPTLKQIAK
EILVNEEDIKGYRVTSTGKPEFTNLKVYHDIKDITARKEIIENAELLDQIAKILTIYQSSEDIQEELTNLNSELTQE

[chemical structure]

[chemical structure]

EGKCLYSLEAIPLEDLLNNPFNYEVDH*IIPRSVSFDNSFNNKVLVKQEEASKKGNRTPFQYLSSSDSKISYETFKK

[chemical structure]

[chemical structure]

[chemical structure]

QKLKLIMEQYGDEKNPLYKYYEETGNYLTKYSKKDNGPVIKKIKYYGNKLNAHLDITDDYPNS*RNKVVKLSLKPYR
FDVYLDNGVYKFVTVKNLDVIKKENYYEVNSKAYEEAKKLKKISNQAEFIASFYNNDLIKINGELYRVIGVNNDLLN
RIEVNMIDITYREYLEN*MNDKRPPRIIKTIASKTQSIKKYSTDILGNLYEVKSKKHPQIIKKG

[0297] This disclosure provides Cas9 variants in which one or more of the amino acid residues identified by an asterisk are mutated as described herein. In some embodiments, the D10 and H840 residues are mutated, e.g., to an alanine residue, and the Cas9 variants provided include one or more additional mutations of the amino acid residues identified by an asterisk as provided herein. In some embodiments, the D10 residue is mutated, e.g., to an alanine residue, and the Cas9 variants provided include one or more additional mutations of the amino acid residues identified by an asterisk as provided herein.

[0298] A number of Cas9 sequences from various species were aligned to determine whether corresponding homologous amino acid residues can be identified in other Cas9 proteins, allowing the generation of Cas9 variants with corresponding mutations of the homologous amino acid residues. The alignment was carried out using the NCBI Constraint-based Multiple Alignment Tool (COBALT (accessible at st-va.ncbi.nlm.nih.gov/tools/cobalt), with the following parameters. Alignment parameters: Gap penalties-11,-1; End-Gap penalties-5,-1. CDD Parameters: Use RPS BLAST on; Blast E-value 0.003; Find Conserved columns and Recompute on. Query Clustering Parameters: Use query clusters on; Word Size 4; Max cluster distance 0.8; Alphabet Regular.

[0299] An exemplary alignment of four Cas9 sequences is provided below. The Cas9 sequences in the alignment are: Sequence 1 (S1): SEQ ID NO: 10|WP_010922251| gi 499224711|type II CRISPR RNA-guided endonuclease Cas9 [Streptococcus pyogenes]; Sequence 2 (S2): SEQ ID NO: 11|WP_039695303|gi 746743737|type II CRISPR RNA-guided endonuclease Cas9 [Streptococcus gallolyticus]; Sequence 3 (S3): SEQ ID NO: 12| WP_045635197|gi 782887988|type II CRISPR RNA-guided endonuclease Cas9 [Streptococcus mitis]; Sequence 4 (S4): SEQ ID NO: 13|5AXW_A|gi 924443546|Staphylococcus Aureus Cas9. The HNH domain (bold and underlined) and the RuvC domain (boxed) are identified for each of the four sequences. Amino acid residues 10, 122, 137, 182, 262, 294, 409, 480, 543, 660, 694, 840, 1219, and 1329 in S1 and the homologous amino acids in the aligned sequences are identified with an asterisk following the respective amino acid residue.

S1 1 --MDKK-YSIGLD*IGTNSVGWAVITDEYKVPSKKFKVLGNTDRHSIKKNLI--GALLFDSG--ETAEATRLKRTARRRYT 73
S2 1 --MTKKNYSIGLD*IGTNSVGWAVITDDYKVPAKKMKVLGNTDKKYIKKNLL--GALLFDSG--ETAEATRLKRTARRRYT 74
S3 1 --M-KKGYSIGLD*IGTNSVGFAVITDDYKVPSKKMKVLGNTDKRFIKKNLI--GALLFDEG--TTAEARRLKRTARRRYT 73
S4 1 GSHMKRNYILGLD*IGITSVGYGII--DYET-----------------RDVIDAGVRLFKEANVENNEGRRSKRGARRLKR 61
S1 74 RRKNRICYLQEIFSNEMAKVDDSFFHRLEESFLVEEDKKHERHPIFGNI*VDEVAYHEKYPTIYH*LRKKLVDSTDKADLRL 153
S2 75 RRKNRLRYLQEIFANEIAKVDESFFQRLDESFLTDDDKTFDSHPIFGNK*AEEDAYHQKFPTIYH*LRKHLADSSEKADIRL 154
S3 74 RRKNRLRYLQEIFSEEMSKVDSSFFHRLDDSFLIPEDKRESKYPIFATL*TEEKEYHKQFPTIYH*LRKQLADSKEKTDLRL 153
S4 62 RRRHRIQRVKKLL--------------------------FDYNLLTD-------- HSELSGINP*YEARVKGLSQKLSEEE 107
S1 154 IYLALAHMIKFRGHFLIEGDLNPDNSDVD*KLFIQLVQTYNQLFEENPINASGVDAKAILSARLSKSRRLENLIAQLPGEK 233
S2 155 VYLALAHMIKFRGHFLIEGELNAENTDVQ*KIFADFVGVYNRTFDDSHLSEITVDVASILTEKISKSRRLENLIKYYPTEK 234
S3 154 IYLALAHMIKFRGHFLIEGDLNPDNSDVD*KLFIQLVQTYNQLFEENPINASGVDAKAILSARLSKSRRLENLIAQLPGEK 233
S4 108 FSAALLHLAKRRG------------------------------------------VHNVNEVEEDT----------------131
S1 234 KNGLFGNLIALSLGLTPNFKSNFDLAEDA*KLQISKDTYDDDLDNLLAQIGDQYADLFLAAK*NLSDAILLSDILRVNTEIT 313
S2 235 KNTLFGNLIALALGLQPNFKTNFKLSEDA*KLQFSKDTYEEDLEELLGKIGDDYADLFTSAK*NLYDAILLSGILTVDDNST 314
S3 234 STGLFSEFLKLIVGNQADFKKHFDLEDKA*PLQFSKDTYDEDLENLLGQIGDDFTDLFVSAK*KLYDAILLSGILTVTDPST 313
S4 132 ---------GNELS-----------------------------------T*KEQISRN------------------------ 144
S1 314 KAPLSASMIKRYDEHHQDLTLLKALVRQQLPEKYKEIFFDQSKNGYAGYIDGGASQEEFYKFIKPILERM---DGTEELLV 391
S2 315 KAPLSASMIKRYVEHHEDLEKLKEFIKANKSELYHDIFKDKNKNGYAGYIENGVKQDEFYKYLKNILLSKIKIDGSDYFLD 394
S3 314 KAPLSASMIERYENHQNDLAALKQFIKNNLPEKYDEVFSDQSKDGYAGYIDGTTQETFYKYIKNLLISKF---EGTDYFLD 391
S4 145 -------SKALEEKYVAELQ---------------------------------------- -------LERLKKDG----- 165
S1 392 KLNREDLLRKQRTFDNGS*IPHQIHLGELHAILRRQEDFYPFLKDNREKIEKILTFRIPYYVGPLARGNSRFAWMTRKSEE 471
S2 395 KIEREDFLRKQRTFDNGS*IPHQIHLQEMHAILRRQGDYYPFLKEKQDRIEKILTFRIPYYVGPLVRKDSRFAWAEYRSDE 474
S3 392 KIEREDFLRKQRTFDNGS*IPHQIHLQEMNAILRRQEYYPFLYKDNKEKIEKILTFRIPYYVGPLARGNRDFAWLTRNSDE 471
S4 166 --EVRGSINRFKTSD-------------YVKEAKQLLKVQKAYHQLQSFIDTYIDLLETRRTYYEGP--GEGSPFGW---K 227
S1 472 TITPWNFEE*VVDKGASAQSFIERMTNFDKNLPNEKVLPKHSLLYEYFTVYNELTKVKYVTEGMRKPAFLSGE*QKKAIVDL 551
S2 475 KITPWNFDK*VIDKEKSAEKFITRMTLNDLYLPEEKVLPKHSHVYETYAVYNELTKIKYVNEQGKE-SFFDSN*MKQEIFDH 553
S3 472 AIRPWNFEE*IVDKASSAEDFINKMTNYDLYLPEEKVLPKHSLLYETFAVYNELTKVKFIAEGLRDYQFLDSG*QKKQIVNQ 551
S4 228 DIKEW-----------------YEMLMGHCTYFPEELRSVKYAYNADLYNALNDLNNLVITRDENEK--LEYY*EKFQIIEN 289
S1 552 LFKTNRKVTVKQLKEDYFKKIECFDSVEISGVEDR---FNASLGTYHDLLKIIKDKDFLDNEENEDILEDIVLTLTLFED 628
S2 554 VFKENRKVTKEKLLNYLNKEPPEYRIKDLIGLDKENKSFNASLGTYHDLKKIL-DKAFLDDKVNEEVIEDIIKTLTLFED 632
S3 552 LFKENRKVTEKDIIHYLHN-VDGYDGIELKGIEKQ---FNASLSTYHDLLKIIKDKEFMDDAKNEAILENIVHTLTIFED 627
S4 290 VFKQKKKPTLKQIAKEILVNEEDIKGYRVTSTGKPEF---TNLKVYHDIKDITARKEII---ENAELLDQIAKILTIYQS 363
S1 629 REMIEERLKTYAHLFDDKVMKQLKR-RRYTGWG*RLSRRLINGIRDKQSGKTILDFLKSDGFANRNFM*QLIHDDSLTFRED 707
S2 633 KDMIHERLQKYSDIFTANQLKKLER-RHYTGWG*RLSYKLINGIRNKENNKTILDYLIDDGSANRNFM*QLINDDTLPFKQI 711
S3 628 REMIKQRLAQYDSLFDERVIKALTR-RHYTGWG*KLSAKLINGICDKQTGNTILDYLIDDGKINRNFM*QLINDDGLSFKEI 706
S4 364 SEDIQEELTNLNSELTQEEIEQISNLKGYGTH*NLSLKAINLILDE--------LWTNDNQIAIFNRL*KLVP--------- 428

[chemical structure]

[chemical structure]

[chemical structure]

[chemical structure]

S1 782 KRIEEGIKELGSQIL-----KEIHPVENTQLQNEKLYLYYLQNGRDMYVDQELDINRLSD-----YDVDH*IVPQSFLKDD 850
S2 785 KKLQNSLKELGSNILNEEKPSYIEDKVENSHLQNDQLFLYYIQNGKDMYTGDELDIDHLSD----YDIDH*IIPQAFIKDD 860
S3 780 KRIEDSLKILASGL---DSNILKENPTDNNQLQNDRLFLYYLQNGKDMYTGEALDINGLSS----YDIDH*IIPQAFIKDD 852
S4 506 ERIEKIIRTTGK---------------ENAKYLIEKIKLHDMQEGKCLYSLEAIPLEDLLNNPFNYEVDH*IIPRSVSFDN 570

[chemical structure]

[chemical structure]

[chemical structure]

[chemical structure]

[chemical structure]

[chemical structure]

[chemical structure]

[chemical structure]

[chemical structure]

[chemical structure]

[chemical structure]

[chemical structure]

[chemical structure]

[chemical structure]

[chemical structure]

[chemical structure]

S1 1150 EKGKSKKLKSVKELLGITIMERSSFEKNPI-DFLEAKG----YKEVKKDLIIKLPKYSLFELENGRKRMLASAGE*LQKG 1223
S2 1159 EKGKAKKLKTVKELVGISIMERSFFEENPV-EFLENKG----YHNIREDKLIKLPKYSLFEFEGGRRRLLASASE*LQKG 1232
S3 1157 EKGKAKKLKTVKTLVGITIMEKAAFEENPI-TFLENKG----YHNVRKENILCLPKYSLFELENGRRRLLASAKE*LQKG 1230
S4 836 DPQTYQKLK--------LIMEQYGDEKNPLYKYYEETGNYLTKYSKKDNGPIKKIKYYGNKLNAHLDITDDYPNS*RNKV 907
S1 1224 NELALPSKYVNFLYLASHYEKLKGSPEDNEQKQLFVEQHKHYLDEIIEQISEFSKRVILADANLDKVLSAYNKH------ 1297
S2 1233 NEMVLPGYLVELLYHAHRADNF----NSTEYLNYVSEHKKEFEKVLSCVEDFANLYVDVEKNLSKIRAVADSM------- 1301
S3 1231 NEIVLPVYLTTLLYHSKNVHKL----DEPGHLEYIQKHRNEFKDLLNLVSEFSQKYVLADANLEKIKSLYADN------- 1299
S4 908 VKLSLKPYRFD-VYLDNGVYKFV----TVKNLDVIK--KENYYEVNSKAYEEAKKLKKISNQAEFIASFYNNDLIKING 979
S1 1298 RDKPIREQAENIIHLFTLTNLGAPAAFKYFDT*TIDRKRYTSTKEVLDATLIHQSIT---------GLYETRI---DLSQL 1365
S2 1302 DNFSIEEISNSFINLLTLTALGAPADFNFLGE*KIPRKRYTSTKECINATLIHQSIT--------GLYETRI----DLSKL 1369
S3 1300 EQADIEILANSFINLLTFTALGAPAAFKFFGK*DIDRKRYTTVSEILNATLIHQSIT-------GLYTETWI----DLSKL 1367
S4 980 ELYRVIGVNNDLLNRIEVNMIDITYR-EYLEN*MNDKRPPRIIKTIASKT---QSIKKYSTDILGNLYEVKSKKHPQIIKK 1055
S1 1366 GGD 1368
S2 1370 GEE 1372
S3 1368 GED 1370
S4 1056 G00 1056

[0300] The alignment demonstrates that amino acid sequences and amino acid residues that are homologous to a reference Cas9 amino acid sequence or amino acid residue can be identified across Cas9 sequence variants, including, but not limited to Cas9 sequences from different species, by identifying the amino acid sequence or residue that aligns with the reference sequence or the reference residue using alignment programs and algorithms known in the art. This disclosure provides Cas9 variants in which one or more of the amino acid residues identified by an asterisk in SEQ ID NO: 9 are mutated as described herein. The residues in Cas9 sequences other than SEQ ID NO: 9 that correspond to the residues identified in SEQ ID NO: 9 by an asterisk are referred to herein as “homologous” or “corresponding” residues. Such homologous residues can be identified by sequence alignment, e.g., as described above, and by identifying the sequence or residue that aligns with the reference sequence or residue. Similarly, mutations in Cas9 sequences other than SEQ ID NO: 9 that correspond to mutations identified in SEQ ID NO: 9 herein, e.g., mutations of residues 10, 122, 137, 182, 262, 294, 409, 480, 543, 660, 694, 840, 1219, and 1329 in SEQ ID NO: 9, are referred to herein as “homologous” or “corresponding” mutations. For example, the mutations corresponding to the D10A mutation in S1 for the four aligned sequences above are D10A for S2, D9A for S3, and D13A for S4; the corresponding mutations for H840A in S1 are H850A for S2, H842A for S3, and H560 for S4; the corresponding mutation for X1219V in S1 are X1228V for S2, X1226 for S3, and X903V for S4, and so on.

[0301] A total of 250 Cas9 sequences (SEQ ID NOs: 10-262) from different species were aligned using the same algorithm and alignment parameters outlined above. Amino acid residues homologous to residues 10, 122, 137, 182, 262, 294, 409, 480, 543, 660, 694, 840, 1219, and 1329 were identified in the same manner as outlined above. The alignments are provided below. The HNH domain (bold and underlined) and the RuvC domain (boxed) are identified for each of the four sequences. Residues corresponding to amino acid residues 10, 122, 137, 182, 262, 294, 409, 480, 543, 660, 694, 840, 1219, and 1329 in SEQ ID NO: 9 are boxed in SEQ ID NO: 10 in the alignments, allowing for the identification of the corresponding amino acid residues in the aligned sequences.

[0302] Cas9 variants with one or more mutations in amino acid residues homologous to amino acid residues 122, 137, 182, 262, 294, 409, 480, 543, 660, 694, 1219, and 1329 of SEQ ID NO: 9 are provided herein. In some embodiments, the Cas9 variants provided herein comprise mutations corresponding to the D10A and the H840A mutations in SEQ ID NO: 9, resulting in a nuclease-inactive dCas9, and at least one, at least two, at least three, at least four, at least five, at least six, or at least seven mutations of amino acid residues homologous to amino acid residues 122, 137, 182, 262, 294, 409, 480, 543, 660, 694, 1219, and 1329 of SEQ ID NO: 9.

[0303] Cas9 variants with one or more mutations in amino acid residues homologous to amino acid residues 122, 137, 182, 262, 294, 409, 480, 543, 660, 694, 1219, and 1329 of SEQ ID NO: 9 are provided herein. In some embodiments, the Cas9 variants provided herein comprise mutations corresponding to the D10A mutations in SEQ ID NO: 9, resulting in a partially nuclease-inactive dCas9, wherein the Cas9 can nick the non-target strand but not the targeted strand, and at least one, at least two, at least three, at least four, at least five, at least six, or at least seven mutations of amino acid residues homologous to amino acid residues 122, 137, 182, 262, 294, 409, 480, 543, 660, 694, 1219, and 1329 of SEQ ID NO: 9.

| WP_010922251.1 | type II CRISPR RNA-guided endonuclease Cas9 [Streptococcus pyogenes] SEQ ID NO: 10 | | |
|---|---|---|---|
| WP_039695303.1 | type II CRISPR RNA-guided endonuclease Cas9 [Streptococcus gallolyticus] SEQ ID NO: 11 | | |
| WP_045635197.1 | type II CRISPR RNA-guided endonuclease Cas9 [Streptococcus mitis] SEQ ID NO: 12 | | |
| 5AXW_A | Cas9, Chain A, Crystal Structure [Staphylococcus Aureus] SEQ ID NO: 13 | | |
| WP_009880683.1 | type II CRISPR RNA-guided endonuclease Cas9 [Streptococcus pyogenes] SEQ ID NO: 14 | | |
| WP_010922251.1 | type II CRISPR RNA-guided endonuclease Cas9 [Streptococcus pyogenes] SEQ ID NO: 15 | | |
| WP_011054416.1 | type II CRISPR RNA-guided endonuclease Cas9 [Streptococcus pyogenes] SEQ ID NO: 16 | | |
| WP_011284745.1 | type II CRISPR RNA-guided endonuclease Cas9 [Streptococcus pyogenes] SEQ ID NO: 17 | | |
| WP_011285506.1 | type II CRISPR RNA-guided endonuclease Cas9 [Streptococcus pyogenes] SEQ ID NO: 18 | | |
| WP_011527619.1 | type II CRISPR RNA-guided endonuclease Cas9 [Streptococcus pyogenes] SEQ ID NO: 19 | | |
| WP_012560673.1 | type II CRISPR RNA-guided endonuclease Cas9 [Streptococcus pyogenes] SEQ ID NO: 20 | | |
| WP_014407541.1 | type II CRISPR RNA-guided endonuclease Cas9 [Streptococcus pyogenes] SEQ ID NO: 21 | | |
| WP_020905136.1 | type II CRISPR RNA-guided endonuclease Cas9 [Streptococcus pyogenes] SEQ ID NO: 22 | | |
| WP_023080005.1 | type II CRISPR RNA-guided endonuclease Cas9 [Streptococcus pyogenes] SEQ ID NO: 23 | | |
| WP_023610282.1 | type II CRISPR RNA-guided endonuclease Cas9 [Streptococcus pyogenes] SEQ ID NO: 24 | | |
| WP_030125963.1 | type II CRISPR RNA-guided endonuclease Cas9 [Streptococcus pyogenes] SEQ ID NO: 25 | | |
| WP_030126706.1 | type II CRISPR RNA-guided endonuclease Cas9 [Streptococcus pyogenes] SEQ ID NO: 26 | | |
| WP_031488318.1 | type II CRISPR RNA-guided endonuclease Cas9 [Streptococcus pyogenes] SEQ ID NO: 27 | | |
| WP_032460140.1 | type II CRISPR RNA-guided endonuclease Cas9 [Streptococcus pyogenes] SEQ ID NO: 28 | | |
| WP_032461047.1 | type II CRISPR RNA-guided endonuclease Cas9 [Streptococcus pyogenes] SEQ ID NO: 29 | | |
| WP_032462016.1 | type II CRISPR RNA-guided endonuclease Cas9 [Streptococcus pyogenes] SEQ ID NO: 30 | | |
| WP_032462936.1 | type II CRISPR RNA-guided endonuclease Cas9 [Streptococcus pyogenes] SEQ ID NO: 31 | | |
| WP_032464890.1 | type II CRISPR RNA-guided endonuclease Cas9 [Streptococcus pyogenes] SEQ ID NO: 32 | | |
| WP_033888930.1 | type II CRISPR RNA-guided endonuclease Cas9 [Streptococcus pyogenes] SEQ ID NO: 33 | | |
| WP_038431314.1 | type II CRISPR RNA-guided endonuclease Cas9 [Streptococcus pyogenes] SEQ ID NO: 34 | | |
| WP_038432938.1 | type II CRISPR RNA-guided endonuclease Cas9 [Streptococcus pyogenes] SEQ ID NO: 35 | | |
| WP_038434062.1 | type II CRISPR RNA-guided endonuclease Cas9 [Streptococcus pyogenes] SEQ ID NO: 36 | | |
| BAQ51233.1 | CRISPR-associated protein, Csn1 family [Streptococcus pyogenes] SEQ ID NO: 37 | | |
| KGE60162.1 | hypothetical protein MGAS2111_0903 [Streptococcus pyogenes MGAS2111] SEQ ID NO: 38 | | |
| KGE60856.1 | CRISPR-associated endonuclease protein [Streptococcus pyogenes SS1447] SEQ ID NO: 39 | | |
| WP_002989955.1 | MULTISPECIES: type II CRISPR RNA-guided endonuclease Cas9 [Streptococcus] SEQ ID NO: 40 | | |
| WP_003030002.1 | MULTISPECIES: type II CRISPR RNA-guided endonuclease Cas9 [Streptococcus] SEQ ID NO: 41 | | |
| WP_003065552.1 | MULTISPECIES: type II CRISPR RNA-guided endonuclease Cas9 [Streptococcus] SEQ ID NO: 42 | | |
| WP_001040076.1 | type II CRISPR RNA-guided endonuclease Cas9 [Streptococcus agalactiae] SEQ ID NO: 43 | | |
| WP_001040078.1 | type II CRISPR RNA-guided endonuclease Cas9 [Streptococcus agalactiae] SEQ ID NO: 44 | | |
| WP_001040080.1 | type II CRISPR RNA-guided endonuclease Cas9 [Streptococcus agalactiae] SEQ ID NO: 45 | | |
| WP_001040081.1 | type II CRISPR RNA-guided endonuclease Cas9 [Streptococcus agalactiae] SEQ ID NO: 46 | | |
| WP_001040083.1 | type II CRISPR RNA-guided endonuclease Cas9 [Streptococcus agalactiae] SEQ ID NO: 47 | | |
| WP_001040085.1 | type II CRISPR RNA-guided endonuclease Cas9 [Streptococcus agalactiae] SEQ ID NO: 48 | | |
| WP_001040087.1 | type II CRISPR RNA-guided endonuclease Cas9 [Streptococcus agalactiae] SEQ ID NO: 49 | | |
| WP_001040088.1 | type II CRISPR RNA-guided endonuclease Cas9 [Streptococcus agalactiae] SEQ ID NO: 50 | | |
| WP_001040089.1 | type II CRISPR RNA-guided endonuclease Cas9 [Streptococcus agalactiae] SEQ ID NO: 51 | | |
| WP_001040090.1 | type II CRISPR RNA-guided endonuclease Cas9 [Streptococcus agalactiae] SEQ ID NO: 52 | | |
| WP_001040091.1 | type II CRISPR RNA-guided endonuclease Cas9 [Streptococcus agalactiae] SEQ ID NO: 53 | | |
| WP_001040092.1 | type II CRISPR RNA-guided endonuclease Cas9 [Streptococcus agalactiae] SEQ ID NO: 54 | | |
| WP_001040094.1 | type II CRISPR RNA-guided endonuclease Cas9 [Streptococcus agalactiae] SEQ ID NO: 55 | | |
| WP_001040095.1 | type II CRISPR RNA-guided endonuclease Cas9 [Streptococcus agalactiae] SEQ ID NO: 56 | | |
| WP_001040096.1 | type II CRISPR RNA-guided endonuclease Cas9 [Streptococcus agalactiae] SEQ ID NO: 57 | | |
| WP_001040097.1 | type II CRISPR RNA-guided endonuclease Cas9 [Streptococcus agalactiae] SEQ ID NO: 58 | | |
| WP_001040098.1 | type II CRISPR RNA-guided endonuclease Cas9 [Streptococcus agalactiae] SEQ ID NO: 59 | | |
| WP_001040099.1 | type II CRISPR RNA-guided endonuclease Cas9 [Streptococcus agalactiae] SEQ ID NO: 60 | | |
| WP_001040100.1 | type II CRISPR RNA-guided endonuclease Cas9 [Streptococcus agalactiae] SEQ ID NO: 61 | | |
| WP_001040104.1 | type II CRISPR RNA-guided endonuclease Cas9 [Streptococcus agalactiae] SEQ ID NO: 62 | | |
| WP_001040105.1 | type II CRISPR RNA-guided endonuclease Cas9 [Streptococcus agalactiae] SEQ ID NO: 63 | | |
| WP_001040106.1 | type II CRISPR RNA-guided endonuclease Cas9 [Streptococcus agalactiae] SEQ ID NO: 64 | | |
| WP_001040107.1 | type II CRISPR RNA-guided endonuclease Cas9 [Streptococcus agalactiae] SEQ ID NO: 65 | | |
| WP_001040108.1 | type II CRISPR RNA-guided endonuclease Cas9 [Streptococcus agalactiae] SEQ ID NO: 66 | | |
| WP_001040109.1 | type II CRISPR RNA-guided endonuclease Cas9 [Streptococcus agalactiae] SEQ ID NO: 67 | | |
| WP_001040110.1 | type II CRISPR RNA-guided endonuclease Cas9 [Streptococcus agalactiae] SEQ ID NO: 68 | | |
| WP_015058523.1 | type II CRISPR RNA-guided endonuclease Cas9 [Streptococcus agalactiae] SEQ ID NO: 69 | | |
| WP_017643650.1 | type II CRISPR RNA-guided endonuclease Cas9 [Streptococcus agalactiae] SEQ ID NO: 70 | | |
| WP_017647151.1 | type II CRISPR RNA-guided endonuclease Cas9 [Streptococcus agalactiae] SEQ ID NO: 71 | | |
| WP_017648376.1 | type II CRISPR RNA-guided endonuclease Cas9 [Streptococcus agalactiae] SEQ ID NO: 72 | | |
| WP_017649527.1 | type II CRISPR RNA-guided endonuclease Cas9 [Streptococcus agalactiae] SEQ ID NO: 73 | | |
| WP_017771611.1 | type II CRISPR RNA-guided endonuclease Cas9 [Streptococcus agalactiae] SEQ ID NO: 74 | | |
| WP_017771984.1 | type II CRISPR RNA-guided endonuclease Cas9 [Streptococcus agalactiae] SEQ ID NO: 75 | | |
| CFQ25032.1 | CRISPR-associated protein [Streptococcus agalactiae] SEQ ID NO: 76 | | |
| CFV16040.1 | CRISPR-associated protein [Streptococcus agalactiae] SEQ ID NO: 77 | | |
| KLJ37842.1 | CRISPR-associated protein Csn1 [Streptococcus agalactiae] SEQ ID NO: 78 | | |
| KLJ72361.1 | CRISPR-associated protein Csn1 [Streptococcus agalactiae] SEQ ID NO: 79 | | |
| KLL20707.1 | CRISPR-associated protein Csn1 [Streptococcus agalactiae] SEQ ID NO: 80 | | |
| KLL42645.1 | CRISPR-associated protein Csn1 [Streptococcus agalactiae] SEQ ID NO: 81 | | |
| WP_047207273.1 | type II CRISPR RNA-guided endonuclease Cas9 [Streptococcus agalactiae] SEQ ID NO: 82 | | |
| WP_047209694.1 | type II CRISPR RNA-guided endonuclease Cas9 [Streptococcus agalactiae] SEQ ID NO: 83 | | |
| WP_050198062.1 | type II CRISPR RNA-guided endonuclease Cas9 [Streptococcus agalactiae] SEQ ID NO: 84 | | |
| WP_050201642.1 | type II CRISPR RNA-guided endonuclease Cas9 [Streptococcus agalactiae] SEQ ID NO: 85 | | |
| WP_050204027.1 | type II CRISPR RNA-guided endonuclease Cas9 [Streptococcus agalactiae] SEQ ID NO: 86 | | |
| WP_050881965.1 | type II CRISPR RNA-guided endonuclease Cas9 [Streptococcus agalactiae] SEQ ID NO: 87 | | |
| WP_050886065.1 | type II CRISPR RNA-guided endonuclease Cas9 [Streptococcus agalactiae] SEQ ID NO: 88 | | |
| AHN30376.1 | CRISPR-associated protein Csn1 [Streptococcus agalactiae 138P] SEQ ID NO: 89 | | |
| EAO78426.1 | reticulocyte binding protein [Streptococcus agalactiae H36B] SEQ ID NO: 90 | | |
| CCW42055.1 | CRISPR-associated protein, SAG0894 family [Streptococcus agalactiae ILRI112] SEQ ID NO: 91 | | |
| WP_003041502.1 | type II CRISPR RNA-guided endonuclease Cas9 [Streptococcus anginosus] SEQ ID NO: 92 | | |
| WP_037593752.1 | type II CRISPR RNA-guided endonuclease Cas9 [Streptococcus anginosus] SEQ ID NO: 93 | | |
| WP_049516684.1 | CRISPR-associated protein Csn1 [Streptococcus anginosus] SEQ ID NO: 94 | | |
| GAD46167.1 | hypothetical protein ANG6_0662 [Streptococcus anginosus T5] SEQ ID NO: 95 | | |
| WP_018363470.1 | type II CRISPR RNA-guided endonuclease Cas9 [Streptococcus caballi] SEQ ID NO: 96 | | |
| WP_003043819.1 | type II CRISPR RNA-guided endonuclease Cas9 [Streptococcus canis] SEQ ID NO: 97 | | |
| WP_006269658.1 | type II CRISPR RNA-guided endonuclease Cas9 [Streptococcus constellatus] SEQ ID NO: 98 | | |
| WP_048800889.1 | type II CRISPR RNA-guided endonuclease Cas9 [Streptococcus constellatus] SEQ ID NO: 99 | | |
| WP_012767106.1 | type II CRISPR RNA-guided endonuclease Cas9 [Streptococcus dysgalactiae] SEQ ID NO: 100 | | |
| WP_014612333.1 | type II CRISPR RNA-guided endonuclease Cas9 [Streptococcus dysgalactiae] SEQ ID NO: 101 | | |
| WP_015017095.1 | type II CRISPR RNA-guided endonuclease Cas9 [Streptococcus dysgalactiae] SEQ ID NO: 102 | | |
| WP_015057649.1 | type II CRISPR RNA-guided endonuclease Cas9 [Streptococcus dysgalactiae] SEQ ID NO: 103 | | |
| WP_048327215.1 | type II CRISPR RNA-guided endonuclease Cas9 [Streptococcus dysgalactiae] SEQ ID NO: 104 | | |
| WP_049519324.1 | CRISPR-associated protein Csn1 [Streptococcus dysgalactiae] SEQ ID NO: 105 | | |
| WP_012515931.1 | type II CRISPR RNA-guided endonuclease Cas9 [Streptococcus equi] SEQ ID NO: 106 | | |
| WP_021320964.1 | type II CRISPR RNA-guided endonuclease Cas9 [Streptococcus equi] SEQ ID NO: 107 | | |
| WP_037581760.1 | type II CRISPR RNA-guided endonuclease Cas9 [Streptococcus equi] SEQ ID NO: 108 | | |
| WP_004232481.1 | type II CRISPR RNA-guided endonuclease Cas9 [Streptococcus equinus] SEQ ID NO: 109 | | |
| WP_009854540.1 | type II CRISPR RNA-guided endonuclease Cas9 [Streptococcus gallolyticus] SEQ ID NO: 110 | | |
| WP_012962174.1 | type II CRISPR RNA-guided endonuclease Cas9 [Streptococcus gallolyticus] SEQ ID NO: 111 | | |
| WP_039695303.1 | type II CRISPR RNA-guided endonuclease Cas9 [Streptococcus gallolyticus] SEQ ID NO: 112 | | |
| WP_014334983.1 | type II CRISPR RNA-guided endonuclease Cas9 [Streptococcus infantarius] SEQ ID NO: 113 | | |
| WP_003099269.1 | type II CRISPR RNA-guided endonuclease Cas9 [Streptococcus iniae] SEQ ID NO: 114 | | |
| AHY15608.1 | CRISPR-associated protein Csn1 [Streptococcus iniae] SEQ ID NO: 115 | | |
| AHY17476.1 | CRISPR-associated protein Csn1 [Streptococcus iniae] SEQ ID NO: 116 | | |
| ESR09100.1 | hypothetical protein IUSA1_08595 [Streptococcus iniae IUSA1] SEQ ID NO: 117 | | |
| AGM98575.1 | CRISPR-associated protein Cas9/Csnl, subtype II/NMEMI [Streptococcus iniae SF1] SEQ ID NO: 118 | | |
| ALF27331.1 | CRISPR-associated protein Csn1 [Streptococcus intermedius] SEQ ID NO: 119 | | |
| WP_018372492.1 | type II CRISPR RNA-guided endonuclease Cas9 [Streptococcus massiliensis] SEQ ID NO: 120 | | |
| WP_045618028.1 | type II CRISPR RNA-guided endonuclease Cas9 [Streptococcus mitis] SEQ ID NO: 121 | | |
| WP_045635197.1 | type II CRISPR RNA-guided endonuclease Cas9 [Streptococcus mitis] SEQ ID NO: 122 | | |
| WP_002263549.1 | type II CRISPR RNA-guided endonuclease Cas9 [Streptococcus mutans] SEQ ID NO: 123 | | |
| WP_002263887.1 | type II CRISPR RNA-guided endonuclease Cas9 [Streptococcus mutans] SEQ ID NO: 124 | | |
| WP_002264920.1 | type II CRISPR RNA-guided endonuclease Cas9 [Streptococcus mutans] SEQ ID NO: 125 | | |
| WP_002269043.1 | type II CRISPR RNA-guided endonuclease Cas9 [Streptococcus mutans] SEQ ID NO: 126 | | |
| WP_002269448.1 | type II CRISPR RNA-guided endonuclease Cas9 [Streptococcus mutans] SEQ ID NO: 127 | | |
| WP_002271977.1 | type II CRISPR RNA-guided endonuclease Cas9 [Streptococcus mutans] SEQ ID NO: 128 | | |
| WP_002272766.1 | type II CRISPR RNA-guided endonuclease Cas9 [Streptococcus mutans] SEQ ID NO: 129 | | |
| WP_002273241.1 | type II CRISPR RNA-guided endonuclease Cas9 [Streptococcus mutans] SEQ ID NO: 130 | | |
| WP_002275430.1 | type II CRISPR RNA-guided endonuclease Cas9 [Streptococcus mutans] SEQ ID NO: 131 | | |
| WP_002276448.1 | type II CRISPR RNA-guided endonuclease Cas9 [Streptococcus mutans] SEQ ID NO: 132 | | |
| WP_002277050.1 | type II CRISPR RNA-guided endonuclease Cas9 [Streptococcus mutans] SEQ ID NO: 133 | | |
| WP_002277364.1 | type II CRISPR RNA-guided endonuclease Cas9 [Streptococcus mutans] SEQ ID NO: 134 | | |
| WP_002279025.1 | type II CRISPR RNA-guided endonuclease Cas9 [Streptococcus mutans] SEQ ID NO: 135 | | |
| WP_002279859.1 | type II CRISPR RNA-guided endonuclease Cas9 [Streptococcus mutans] SEQ ID NO: 136 | | |
| WP_002280230.1 | type II CRISPR RNA-guided endonuclease Cas9 [Streptococcus mutans] SEQ ID NO: 137 | | |
| WP_002281696.1 | type II CRISPR RNA-guided endonuclease Cas9 [Streptococcus mutans] SEQ ID NO: 138 | | |
| WP_002282247.1 | type II CRISPR RNA-guided endonuclease Cas9 [Streptococcus mutans] SEQ ID NO: 139 | | |
| WP_002282906.1 | type II CRISPR RNA-guided endonuclease Cas9 [Streptococcus mutans] SEQ ID NO: 140 | | |
| WP_002283846.1 | type II CRISPR RNA-guided endonuclease Cas9 [Streptococcus mutans] SEQ ID NO: 141 | | |
| WP_002287255.1 | type II CRISPR RNA-guided endonuclease Cas9 [Streptococcus mutans] SEQ ID NO: 142 | | |
| WP_002288990.1 | type II CRISPR RNA-guided endonuclease Cas9 [Streptococcus mutans] SEQ ID NO: 143 | | |
| WP_002289641.1 | type II CRISPR RNA-guided endonuclease Cas9 [Streptococcus mutans] SEQ ID NO: 144 | | |
| WP_002290427.1 | type II CRISPR RNA-guided endonuclease Cas9 [Streptococcus mutans] SEQ ID NO: 145 | | |
| WP_002295753.1 | type II CRISPR RNA-guided endonuclease Cas9 [Streptococcus mutans] SEQ ID NO: 146 | | |
| WP_002296423.1 | type II CRISPR RNA-guided endonuclease Cas9 [Streptococcus mutans] SEQ ID NO: 147 | | |
| WP_002304487.1 | type II CRISPR RNA-guided endonuclease Cas9 [Streptococcus mutans] SEQ ID NO: 148 | | |
| WP_002305844.1 | type II CRISPR RNA-guided endonuclease Cas9 [Streptococcus mutans] SEQ ID NO: 149 | | |
| WP_002307203.1 | type II CRISPR RNA-guided endonuclease Cas9 [Streptococcus mutans] SEQ ID NO: 150 | | |
| WP_002310390.1 | type II CRISPR RNA-guided endonuclease Cas9 [Streptococcus mutans] SEQ ID NO: 151 | | |
| WP_002352408.1 | type II CRISPR RNA-guided endonuclease Cas9 [Streptococcus mutans] SEQ ID NO: 152 | | |
| WP_012997688.1 | type II CRISPR RNA-guided endonuclease Cas9 [Streptococcus mutans] SEQ ID NO: 153 | | |
| WP_014677909.1 | type II CRISPR RNA-guided endonuclease Cas9 [Streptococcus mutans] SEQ ID NO: 154 | | |
| WP_019312892.1 | type II CRISPR RNA-guided endonuclease Cas9 [Streptococcus mutans] SEQ ID NO: 155 | | |
| WP_019313659.1 | type II CRISPR RNA-guided endonuclease Cas9 [Streptococcus mutans] SEQ ID NO: 156 | | |
| WP_019314093.1 | type II CRISPR RNA-guided endonuclease Cas9 [Streptococcus mutans] SEQ ID NO: 157 | | |
| WP_019315370.1 | type II CRISPR RNA-guided endonuclease Cas9 [Streptococcus mutans] SEQ ID NO: 158 | | |
| WP_019803776.1 | type II CRISPR RNA-guided endonuclease Cas9 [Streptococcus mutans] SEQ ID NO: 159 | | |
| WP_019805234.1 | type II CRISPR RNA-guided endonuclease Cas9 [Streptococcus mutans] SEQ ID NO: 160 | | |
| WP_024783594.1 | type II CRISPR RNA-guided endonuclease Cas9 [Streptococcus mutans] SEQ ID NO: 161 | | |
| WP_024784288.1 | type II CRISPR RNA-guided endonuclease Cas9 [Streptococcus mutans] SEQ ID NO: 162 | | |
| WP_024784666.1 | type II CRISPR RNA-guided endonuclease Cas9 [Streptococcus mutans] SEQ ID NO: 163 | | |
| WP_024784894.1 | type II CRISPR RNA-guided endonuclease Cas9 [Streptococcus mutans] SEQ ID NO: 164 | | |
| WP_024786433.1 | type II CRISPR RNA-guided endonuclease Cas9 [Streptococcus mutans] SEQ ID NO: 165 | | |
| WP_049473442.1 | CRISPR-associated protein Csn1 [Streptococcus mutans] SEQ ID NO: 166 | | |
| WP_049474547.1 | CRISPR-associated protein Csn1 [Streptococcus mutans] SEQ ID NO: 167 | | |
| EMC03581.1 | hypothetical protein SMU69_09359 [Streptococcus mutans NLML4] SEQ ID NO: 168 | | |
| WP_000428612.1 | type II CRISPR RNA-guided endonuclease Cas9 [Streptococcus oralis] SEQ ID NO: 169 | | |
| WP_000428613.1 | type II CRISPR RNA-guided endonuclease Cas9 [Streptococcus oralis] SEQ ID NO: 170 | | |
| WP_049523028.1 | CRISPR-associated protein Csn1 [Streptococcus parasanguinis] SEQ ID NO: 171 | | |
| WP_003107102.1 | type II CRISPR RNA-guided endonuclease Cas9 [Streptococcus parauberis] SEQ ID NO: 172 | | |
| WP_054279288.1 | type II CRISPR RNA-guided endonuclease Cas9 [Streptococcus phocae] SEQ ID NO: 173 | | |
| WP_049531101.1 | CRISPR-associated protein Csn1 [Streptococcus pseudopneumoniae] SEQ ID NO: 174 | | |
| WP_049538452.1 | CRISPR-associated protein Csn1 [Streptococcus pseudopneumoniae] SEQ ID NO: 175 | | |
| WP_049549711.1 | CRISPR-associated protein Csn1 [Streptococcus pseudopneumoniae] SEQ ID NO: 176 | | |
| WP_007896501.1 | type II CRISPR RNA-guided endonuclease Cas9 [Streptococcus pseudoporcinus] SEQ ID NO: 177 | | |
| EFR44625.1 | CRISPR-associated protein, Csn1 family [Streptococcus pseudoporcinus SPIN 20026] SEQ ID NO: 178 | | |
| WP_002897477.1 | type II CRISPR RNA-guided endonuclease Cas9 [Streptococcus sanguinis] SEQ ID NO: 179 | | |
| WP_002906454.1 | type II CRISPR RNA-guided endonuclease Cas9 [Streptococcus sanguinis] SEQ ID NO: 180 | | |
| WP_009729476.1 | type II CRISPR RNA-guided endonuclease Cas9 [Streptococcus sp. F0441] SEQ ID NO: 181 | | |
| CQR24647.1 | CRISPR-associated protein [Streptococcus sp. FF10] SEQ ID NO: 182 | | |
| WP_000066813.1 | type II CRISPR RNA-guided endonuclease Cas9 [Streptococcus sp. M334] SEQ ID NO: 183 | | |
| WP_009754323.1 | type II CRISPR RNA-guided endonuclease Cas9 [Streptococcus sp. taxon 056] SEQ ID NO: 184 | | |
| WP_044674937.1 | type II CRISPR RNA-guided endonuclease Cas9 [Streptococcus suis] SEQ ID NO: 185 | | |
| WP_044676715.1 | type II CRISPR RNA-guided endonuclease Cas9 [Streptococcus suis] SEQ ID NO: 186 | | |
| WP_044680361.1 | type II CRISPR RNA-guided endonuclease Cas9 [Streptococcus suis] SEQ ID NO: 187 | | |
| WP_044681799.1 | type II CRISPR RNA-guided endonuclease Cas9 [Streptococcus suis] SEQ ID NO: 188 | | |
| WP_049533112.1 | CRISPR-associated protein Csn1 [Streptococcus suis] SEQ ID NO: 189 | | |
| WP_029090905.1 | type II CRISPR RNA-guided endonuclease Cas9 [Brochothrix thermosphacta] SEQ ID NO: 190 | | |
| WP_006506696.1 | type II CRISPR RNA-guided endonuclease Cas9 [Catenibacterium mitsuokai] SEQ ID NO: 191 | | |
| AIT42264.1 | Cas9hc : NLS : HA [Cloning vector pYB196] SEQ ID NO: 192 | | |
| WP_034440723.1 | type II CRISPR endonuclease Cas9 [Clostridiales bacterium S5-A11] SEQ ID NO: 193 | | |
| AKQ21048.1 | Cas9 [CRISPR-mediated gene targeting vector p (bhsp68-Cas9) ] SEQ ID NO: 194 | | |
| WP_004636532.1 | type II CRISPR RNA-guided endonuclease Cas9 [Dolosigranulum pigrum] SEQ ID NO: 195 | | |
| WP_002364836.1 | MULTISPECIES: type II CRISPR RNA-guided endonuclease Cas9 [Enterococcus] SEQ ID NO: 196 | | |
| WP_016631044.1 | MULTISPECIES: type II CRISPR RNA-guided endonuclease Cas9 [Enterococcus] SEQ ID NO: 197 | | |
| EMS75795.1 | hypothetical protein H318_06676 [Enterococcus durans IPLA 655] SEQ ID NO: 198 | | |
| WP_002373311.1 | type II CRISPR RNA-guided endonuclease Cas9 [Enterococcus faecalis] SEQ ID NO: 199 | | |
| WP_002378009.1 | type II CRISPR RNA-guided endonuclease Cas9 [Enterococcus faecalis] SEQ ID NO: 200 | | |
| WP_002407324.1 | type II CRISPR RNA-guided endonuclease Cas9 [Enterococcus faecalis] SEQ ID NO: 201 | | |
| WP_002413717.1 | type II CRISPR RNA-guided endonuclease Cas9 [Enterococcus faecalis] SEQ ID NO: 202 | | |
| WP_010775580.1 | type II CRISPR RNA-guided endonuclease Cas9 [Enterococcus faecalis] SEQ ID NO: 203 | | |
| WP_010818269.1 | type II CRISPR RNA-guided endonuclease Cas9 [Enterococcus faecalis] SEQ ID NO: 204 | | |
| WP_010824395.1 | type II CRISPR RNA-guided endonuclease Cas9 [Enterococcus faecalis] SEQ ID NO: 205 | | |
| WP_016622645.1 | type II CRISPR RNA-guided endonuclease Cas9 [Enterococcus faecalis] SEQ ID NO: 206 | | |
| WP_033624816.1 | type II CRISPR RNA-guided endonuclease Cas9 [Enterococcus faecalis] SEQ ID NO: 207 | | |
| WP_033625576.1 | type II CRISPR RNA-guided endonuclease Cas9 [Enterococcus faecalis] SEQ ID NO: 208 | | |
| WP_033789179.1 | type II CRISPR RNA-guided endonuclease Cas9 [Enterococcus faecalis] SEQ ID NO: 209 | | |
| WP_002310644.1 | type II CRISPR RNA-guided endonuclease Cas9 [Enterococcus faecium] SEQ ID NO: 210 | | |
| WP_002312694.1 | type II CRISPR RNA-guided endonuclease Cas9 [Enterococcus faecium] SEQ ID NO: 211 | | |
| WP_002314015.1 | type II CRISPR RNA-guided endonuclease Cas9 [Enterococcus faecium] SEQ ID NO: 212 | | |
| WP_002320716.1 | type II CRISPR RNA-guided endonuclease Cas9 [Enterococcus faecium] SEQ ID NO: 213 | | |
| WP_002330729.1 | type II CRISPR RNA-guided endonuclease Cas9 [Enterococcus faecium] SEQ ID NO: 214 | | |
| WP_002335161.1 | type II CRISPR RNA-guided endonuclease Cas9 [Enterococcus faecium] SEQ ID NO: 215 | | |
| WP_002345439.1 | type II CRISPR RNA-guided endonuclease Cas9 [Enterococcus faecium] SEQ ID NO: 216 | | |
| WP_034867970.1 | type II CRISPR RNA-guided endonuclease Cas9 [Enterococcus faecium] SEQ ID NO: 217 | | |
| WP_047937432.1 | type II CRISPR RNA-guided endonuclease Cas9 [Enterococcus faecium] SEQ ID NO: 218 | | |
| WP_010720994.1 | type II CRISPR RNA-guided endonuclease Cas9 [Enterococcus hirae] SEQ ID NO: 219 | | |
| WP_010737004.1 | type II CRISPR RNA-guided endonuclease Cas9 [Enterococcus hirae] SEQ ID NO: 220 | | |
| WP_034700478.1 | type II CRISPR RNA-guided endonuclease Cas9 [Enterococcus hirae] SEQ ID NO: 221 | | |
| WP_007209003.1 | type II CRISPR RNA-guided endonuclease Cas9 [Enterococcus italicus] SEQ ID NO: 222 | | |
| WP_023519017.1 | type II CRISPR RNA-guided endonuclease Cas9 [Enterococcus mundtii] SEQ ID NO: 223 | | |
| WP_010770040.1 | type II CRISPR RNA-guided endonuclease Cas9 [Enterococcus phoeniculicola] SEQ ID NO: 224 | | |
| WP_048604708.1 | type II CRISPR RNA-guided endonuclease Cas9 [Enterococcus sp. AM1] SEQ ID NO: 225 | | |
| WP_010750235.1 | type II CRISPR RNA-guided endonuclease Cas9 [Enterococcus villorum] SEQ ID NO: 226 | | |
| AII16583.1 | Cas9 endonuclease [Expression vector pCas9] SEQ ID NO: 227 | | |
| WP_029073316.1 | type II CRISPR RNA-guided endonuclease Cas9 [Kandleria vitulina] SEQ ID NO: 228 | | |
| WP_031589969.1 | type II CRISPR RNA-guided endonuclease Cas9 [Kandleria vitulina] SEQ ID NO: 229 | | |
| KDA45870.1 | CRISPR-associated protein Cas9/Csn1, subtype II/NMEMI [Lactobacillus animalis] SEQ ID NO: 230 | | |
| WP_039099354.1 | type II CRISPR RNA-guided endonuclease Cas9 [Lactobacillus curvatus] SEQ ID NO: 231 | | |
| AKP02966.1 | hypothetical protein ABB45_04605 [Lactobacillus farciminis] SEQ ID NO: 232 | | |
| WP_010991369.1 | type II CRISPR RNA-guided endonuclease Cas9 [Listeria innocua] SEQ ID NO: 233 | | |
| WP_033838504.1 | type II CRISPR RNA-guided endonuclease Cas9 [Listeria innocua] SEQ ID NO: 234 | | |
| EHN60060.1 | CRISPR-associated protein, Csn1 family [Listeria innocua ATCC 33091] SEQ ID NO: 235 | | |
| EFR89594.1 | crispr-associated protein, Csn1 family [Listeria innocua FSL S4-378] SEQ ID NO: 236 | | |
| WP_038409211.1 | type II CRISPR RNA-guided endonuclease Cas9 [Listeria ivanovii] SEQ ID NO: 237 | | |
| EFR95520.1 | crispr-associated protein Csn1 [Listeria ivanovii FSL F6-596] SEQ ID NO: 238 | | |
| WP_003723650.1 | type II CRISPR RNA-guided endonuclease Cas9 [Listeria monocytogenes] SEQ ID NO: 239 | | |
| WP_003727705.1 | type II CRISPR RNA-guided endonuclease Cas9 [Listeria monocytogenes] SEQ ID NO: 240 | | |
| WP_003730785.1 | type II CRISPR RNA-guided endonuclease Cas9 [Listeria monocytogenes] SEQ ID NO: 241 | | |
| WP_003733029.1 | type II CRISPR RNA-guided endonuclease Cas9 [Listeria monocytogenes] SEQ ID NO: 242 | | |
| WP_003739838.1 | type II CRISPR RNA-guided endonuclease Cas9 [Listeria monocytogenes] SEQ ID NO: 243 | | |
| WP_014601172.1 | type II CRISPR RNA-guided endonuclease Cas9 [Listeria monocytogenes] SEQ ID NO: 244 | | |
| WP_023548323.1 | type II CRISPR RNA-guided endonuclease Cas9 [Listeria monocytogenes] SEQ ID NO: 245 | | |
| WP_031665337.1 | type II CRISPR RNA-guided endonuclease Cas9 [Listeria monocytogenes] SEQ ID NO: 246 | | |
| WP_031669209.1 | type II CRISPR RNA-guided endonuclease Cas9 [Listeria monocytogenes] SEQ ID NO: 247 | | |
| WP_033920898.1 | type II CRISPR RNA-guided endonuclease Cas9 [Listeria monocytogenes] SEQ ID NO: 248 | | |
| AKI42028.1 | CRISPR-associated protein [Listeria monocytogenes] SEQ ID NO: 249 | | |
| AKI50529.1 | CRISPR-associated protein [Listeria monocytogenes] SEQ ID NO: 250 | | |
| EFR83390.1 | crispr-associated protein Csn1 [Listeria monocytogenes FSL F2-208] SEQ ID NO: 251 | | |
| WP_046323366.1 | type II CRISPR RNA-guided endonuclease Cas9 [Listeria seeligeri] SEQ ID NO: 252 | | |
| AKE81011.1 | Cas9 [Plant multiplex genome editing vector pYLCRISPR/Cas9Pubi-H] SEQ ID NO: 253 | | |
| CUO82355.1 | Uncharacterized protein conserved in bacteria [Roseburia hominis] SEQ ID NO: 254 | | |
| WP_033162887.1 | type II CRISPR RNA-guided endonuclease Cas9 [Sharpea azabuensis] SEQ ID NO: 255 | | |
| AGZ01981.1 | Cas9 endonuclease [synthetic construct] SEQ ID NO: 256 | | |
| AKA60242.1 | nuclease deficient Cas9 [synthetic construct] SEQ ID NO: 257 | | |
| AKS40380.1 | Cas9 [Synthetic plasmid pFC330] SEQ ID NO: 258 | | |
| 4UN5_B | Cas9, Chain B, Crystal Structure SEQ ID NO: 259 | | |
| WP_010922251 | 1 | [chemical structure] | 73 |
| WP_039695303 | 1 | MTKKnYSIGLDIGTNSVGWAVITDDYKVPAKKMKVLGNTDKKYIKKNLLGALLFDSGETA--EATRLKRTARRRYT | 74 |
| WP_045635197 | 1 | K-KG-YSIGLDIGTNSVGFAVITDDYKVPSKKMKVLGNTDKRFIKKNLIGALLFDEGTTA--EARRLKRTARRRYT | 73 |
| 5AXW_A | 1 | MKRN-YILGLDIGITSVGYGII--DYET------------RDVIDA---GVRLFKEANVEnnEGRRSKRGARRLKR | 61 |
| WP_009880683 | | --------------------------------------------------------------------------- | |
| WP_010922251 | 1 | MDKK-YSIGLDIGTNSVGWAVITDEYKVPSKKFKVLGNTDRHSIKKNLIGALLFDSGETA--EATRLKRTARRRYT | 73 |
| WP_011054416 | 1 | MDKK-YSIGLDIGTNSVGWAVITDDYKVPSKKLKGLGNTDRHGIKKNLIGALLFDSGETA--EATRLKRTARRRYT | 73 |
| WP_011284745 | 1 | MDKK-YSIGLDIGTNSVGWAVITDDYKVPSKKFKVLGNTDRHSIKKNLIGALLFDSGETA--EATRLKRTARRRYT | 73 |
| WP_011285506 | 1 | MDKK-YSIGLDIGTNSVGWAVITDDYKVPSKKFKVLGNTDRHSIKKNLIGALLFDSGETA--EATRLKRTARRRYT | 73 |
| WP_011527619 | 1 | MDKK-YSIGLDIGTNSVGWAVITDDYKVPSKKFKVLGNTDRHSIKKNLIGALLFDSGEIA--EATRLKRTARRRYT | 73 |
| WP_012560673 | 1 | MDKK-YSIGLDIGTNSVGWAVITDDYKVPSKKFKVLGNTDRHSIKKNLIGALLFDSGETA--EATRLKRTARRRYT | 73 |
| WP_014407541 | 1 | MDKK-YSIGLDIGTNSVGWAVITDDYKVPSKKFKVLGNTDRHSIKKNLIGALLFGSGETA--EATRLKRTARRRYT | 73 |
| WP_020905136 | 1 | MDKK-YSIGLDIGTNSVGWAVITDDYKVPSKKFKVLGNTDRHSIKKNLIGALLFDSGETA--EATRLKRTARRRYT | 73 |
| WP_023080005 | 1 | MDKK-YSIGLDIGTNSVGWAVITDDYKVPSKKLKVLGNTDRHGIKKNLIGALLFDSGETA--EATRLKRTARRRYT | 73 |
| WP_023610282 | 1 | MDKK-YSIGLDIGTNSVGWAVITDDYKVPSKKLKVLGNTDRHGIKKNLIGALLFDSGETA--EATRLKRTARRRYT | 73 |
| WP_030125963 | 1 | MDKK-YSIGLDIGTNSVGWAVITDDYKVPSKKFKVLGNTDRHSIKKNLIGALLFDSGETA--EATRLKRTARRRYT | 73 |
| WP_030126706 | 1 | MDKK-YSIGLDIGTNSVGWAVITDDYKVPSKKFKVLGNTDRHGIKKNLIGALLFDSGETA--EATRLKRTARRRYT | 73 |
| WP_031488318 | 1 | MDKK-YSIGLDIGTNSVGWAVITDDYKVPSKKFKVLGNTDRHSIKKNLIGALLFDSGETA--EATRLKRTARRRYT | 73 |
| WP_032460140 | 1 | MDKK-YSIGLDIGTNSVGWAVITDDYKVPSKKFKVLGNTDRHSIKKNLIGALLFDSGETA--EATRLKRTARRRYT | 73 |
| WP_032461047 | 1 | MDKK-YSIGLDIGTNSVGWAVITDDYKVPSKKFKVLGNTDRHSIKKNLIGALLFDSGETA--EATRLKRTARRRYT | 73 |
| WP_032462016 | 1 | MDKK-YSIGLDIGTNSVGWAVITDDYKVPSKKFKVLGNTDRHSIKKNLIGALLFDSGETA--EATRLKRTARRRYT | 73 |
| WP_032462936 | 1 | MDKK-YSIGLDIGTNSVGWAVITDDYKVPSKKFKVLGNTDRHSIKKNLIGALLFDSGETA--EATRLKRTARRRYT | 73 |
| WP_032464890 | 1 | MDKK-YSIGLDIGTNSVGWAVITDDYKVPSKKFKVLGNTDRHSIKKNLIGALLFDSGEIA--EATRLKRTARRRYT | 73 |
| WP_033888930 | | --------------------------------------------------------------------------- | |
| WP_038431314 | 1 | MDKK-YSIGLDIGTNSVGWAVITDDYKVPSKKFKVLGNTDRHSIKKNLIGALLFDSGETA--EATRLKRTARRRYT | 73 |
| WP_038432938 | 1 | MDKK-YSIGLDIGTNSVGWAVITDDYKVPSKKFKVLGNTDRHSIKKNLIGALLFDSGETA--EATRLKRTARRRYT | 73 |
| WP_038434062 | 1 | MDKK-YSIGLDIGTNSVGWAVITDDYKVPSKKFKVLGNTDRHSIKKNLIGALLFDSGETA--EATRLKRTARRRYT | 73 |
| BAQ51233 | | --------------------------------------------------------------------------- | |
| KGE60162 | | --------------------------------------------------------------------------- | |
| KGE60856 | | --------------------------------------------------------------------------- | |
| WP_002989955 | 1 | MDKK-YSIGLDIGTNSVGWAVITDDYKVPSKKFKVLGNTDRHSIKKNLIGALLFDSGEIA--EATRLKRTARRRYT | 73 |
| WP_003030002 | 1 | MDQK-YSIGLDIGTNSVGWAVVTDDYKVPAKKMKVLGNTDKQSIKKNLLGALLFDSGETA--EATRLKRTARRRYT | 73 |
| WP_003065552 | 1 | MTKKNYSIGLDIGTNSVGWAVITDDYKVPAKKMKVLGNTDKKYIKKNLLGALLFDSGETA--EATRLKRTARRRYT | 74 |
| WP_001040076 | 1 | MNKP-YSIGLDIGTNSVGWSIITDDYKVPAKKIRVLGNTDKEYIKKNLIGALLFDGGNTA--ADRRLKRTARRRYT | 73 |
| WP_001040078 | 1 | MNKP-YSIGLDIGTNSVGWSIITDDYKVPAKKMRVLGNTDKEYIKKNLIGALLFDGGNTA--ADRRLKRTARRRYT | 73 |
| WP_001040080 | 1 | MNKP-YSIGLDIGTNSVGWSIITDDYKVPAKKMRVLGNTDKEYIKKNLIGALLFDGGNTA--ADRRLKRTARRRYT | 73 |
| WP_001040081 | 1 | MNKP-YSIGLDIGTNSVGWSIITDDYKVPAKKMRVLGNTDKEYIKKNLIGALLFDGGNTA--ADRRLKRTARRRYT | 73 |
| WP_001040083 | 1 | MNKP-YSIGLDIGTNSVGWSIITDDYKVPAKKMRVLGNTDKEYIKKNLIGALLFDGGNTA--ADRRLKRTARRRYT | 73 |
| WP_001040085 | 1 | MNKP-YSIGLDIGTNSVGWSIITDDYKVPAKKMRVLGNTDKEYIKKNLIGALLFDGGNTA--ADRRLKRTARRRYT | 73 |
| WP_001040087 | 1 | MNKP-YSIGLDIGTNSVGWSIITDDYKVPAKKMRVLGNTDKEYIKKNLIGALLFDGGNTA--ADRRLKRTARRRYT | 73 |
| WP_001040088 | 1 | MNKP-YSIGLDIGTNSVGWSIITDDYKVPAKKMRVLGNTDKEYIKKNLIGALLFDGGNTA--ADRRLKRTARRRYT | 73 |
| WP_001040089 | 1 | MNKP-YSIGLDIGTNSVGWSIITDDYKVPAKKMRVLGNTDKEYIKKNLIGALLFDGGNTA--ADRRLKRTARRRYT | 73 |
| WP_001040090 | 1 | MNKP-YSIGLDIGTNSVGWSIITDDYKVPAKKMRVLGNTDKEYIKKNLIGALLFDGGNTA--ADRRLKRTARRRYT | 73 |
| WP_001040091 | 1 | MNKP-YSIGLDIGTNSVGWSIITDDYKVPAKKMRVLGNTDKEYIKKNLIGALLFDGGNTA--ADRRLKRTARRRYT | 73 |
| WP_001040092 | 1 | MNKP-YSIGLDIGTNSVGWSIITDDYKVPAKKMRVLGNTDKEYIKKNLIGALLFDGGNTA--ADRRLKRTARRRYT | 73 |
| WP_001040094 | 1 | MNKP-YSIGLDIGTNSVGWSIITDDYKVPAKKMRVLGNTDKEYIKKNLIGALLFDGGNTA--ADRRLKRTARRRYT | 73 |
| WP_001040095 | 1 | MNKP-YSIGLDIGTNSVGWSIITDDYKVPAKKMRVLGNTDKEYIKKNLIGALLFDGGNTA--ADRRLKRTARRRYT | 73 |
| WP_001040096 | 1 | MNKP-YSIGLDIGTNSVGWSIITDDYKVPAKKMRVLGNTDKEYIKKNLIGALLFDGGNTA--ADRRLKRTARRRYT | 73 |
| WP_001040097 | 1 | MNKP-YSIGLDIGTNSVGWSIITDDYKVPAKKMRVLGNTDKEYIKKNLIGALLFDGGNTA--ADRRLKRTARRRYT | 73 |
| WP_001040098 | 1 | MNKP-YSIGLDIGTNSVGWSIITDDYKVPAKKMRVLGNTDKEYIKKNLIGALLFDGGNTA--ADRRLKRTARRRYT | 73 |
| WP_001040099 | 1 | MNKP-YSIGLDIGTNSVGWSIITDDYKVPAKKMRVLGNTDKEYIKKNLIGALLFDGGNTA--ADRRLKRTARRRYT | 73 |
| WP_001040100 | 1 | MNKP-YSIGLDIGTNSVGWSIITDDYKVPAKKMRVLGNTDKEYIKKNLIGALLFDGGNTA--ADRRLKRTARRRYT | 73 |
| WP_001040104 | 1 | MNKP-YSIGLDIGTNSVGWSIITDDYKVPAKKMRVLGNTDKEYIKKNLIGALLFDGGNTA--ADRRLKRTARRRYT | 73 |
| WP_001040105 | 1 | MNKP-YSIGLDIGTNSVGWSIITDDYKVPAKKMRVLGNTDKEYIKKNLIGALLFDGGNTA--ADRRLKRTSRRRYT | 73 |
| WP_001040106 | 1 | MNKP-YSIGLDIGTNSVGYSVVTDDYKVPAKKMRVLGNTDKEYIKKNLIGALLFDGGNTA--SDRRLKRTARRRYT | 73 |
| WP_001040107 | 1 | MNKP-YSIGLDIGTNSVGYSVVTDDYKVPAKKMRVLGNTDKEYIKKNLIGALLFDGGNTA--SDRRLKRTARRRYT | 73 |
| WP_001040108 | 1 | MNKP-YSIGLDIGTNSVGYSVVTDDYKVPAKKMRVLGNTDKEYIKKNLIGALLFDGGNTA--SDRRLKRTARRRYT | 73 |
| WP_001040109 | 1 | MNKP-YSIGLDIGTNSVGYSVVTDDYKVPAKKMRVLGNTDKEYIKKNLIGALLFDGGNTA--SDRRLKRTARRRYT | 73 |
| WP_001040110 | 1 | MNKP-YSIGLDIGTNSVGYSVVTDDYKVPAKKMRVLGNTDKEYIKKNLIGALLFDGGNTA--SDRRLKRTARRRYT | 73 |
| WP_015058523 | 1 | MNKP-YSIGLDIGTNSVGWSIITDDYKVPAKKMRVLGNTDKEYIKKNLIGALLFDGGNTA--ADRRLKRTARRRYT | 73 |
| WP_017643650 | 1 | MNKP-YSIGLDIGTNSVGWSIITDDYKVPAKKMRVLGNTDKEYIKKNLIGALLFDGGNTA--ADRRLKRTARRRYT | 73 |
| WP_017647151 | 1 | MNKP-YSIGLDIGTNSVGWSIITDDYKVPAKKMRVLGNTDKEYIKKNLIGALLFDGGNTA--SDRRLKRTARRRYT | 73 |
| WP_017648376 | 1 | MNKP-YSIGLDIGTNSVGWSIITDDYKVPAKKMRVLGNTDKEYIKKNLIGALLFDGGNTA--SDRRLKRTARRRYT | 73 |
| WP_017649527 | 1 | MNKP-YSIGLDIGTNSVGWSIITDDYKVPAKKMRVLGNTDKEYIKKNLIGALLFDGGNTA--ADRRLKRTARRRYT | 73 |
| WP_017771611 | 1 | MNKP-YSIGLDIGTNSVGYSVVTDDYKVPAKKMRVLGNTDKEYIKKNLIGALLFDGGNTA--SDRRLKRTARRRYT | 73 |
| WP_017771984 | 1 | MNKP-YSIGLDIGTNSVGWSIITDDYKVPAKKMRVLGNTDKEYIKKNLIGALLFDGGNTA--ADRRLKRTARRRYT | 73 |
| CFQ25032 | 1 | MNKP-YSIGLDIGTNSVGWSIITDDYKVPAKKMRVLGNTDKEYIKKNLIGALLFDGGNTA--ADRRLKRTARRRYT | 73 |
| CFV16040 | 1 | MNKP-YSIGLDIGTNSVGWSIITDDYKVPAKKMRVLGNTDKEYIKKNLIGALLFDGGNTA--ADRRLKRTARRRYT | 73 |
| KLJ37842 | 1 | MNKP-YSIGLDIGTNSVGWSIITDDYKVPAKKMRVLGNTDKEYIKKNLIGALLFDGGNTA--ADRRLKRTARRRYT | 73 |
| KLJ72361 | 1 | MNKP-YSIGLDIGTNSVGWSIITDDYKVPAKKMRVLGNTDKEYIKKNLIGALLFDGGNTA--ADRRLKRTARRRYT | 73 |
| KLL20707 | 1 | MNKP-YSIGLDIGTNSVGWSIITDDYKVPAKKMRVLGNTDKEYIKKNLIGALLFDGGNTA--ADRRLKRTARRRYT | 73 |
| KLL42645 | 1 | MNKP-YSIGLDIGTNSVGYSVVTDDYKVPAKKMRVLGNTDKEYIKKNLIGALLFDGGNTA--SDRRLKRTARRRYT | 73 |
| WP_047207273 | 1 | MNKP-YSIGLDIGTNSVGWSIITDDYKVPAKKMRVLGNTDKEYIKKNLIGALLFDGRNTA--ADRRLKRTARRRYT | 73 |
| WP_047209694 | 1 | MNKP-YSIGLDIGTNSVGWSIITDDYKVPAKKMRVLGNTDKEYIKKNLIGALLFDGGNTA--ADRRLKRTARRRYT | 73 |
| WP_050198062 | 1 | MNKP-YSIGLDIGTNSVGWSIITDDYKVPAKKMRVLGNTDKEYIKKNLIGALLFDGGNTA--ADRRLKRTARRRYT | 73 |
| WP_050201642 | 1 | MNKP-YSIGLDIGTNSVGWSIITDDYKVPAKKMRVLGNTDKEYIKKNLIGALLFDGGNTA--ADRRLKRTARRRYT | 73 |
| WP_050204027 | 1 | MNKP-YSIGLDIGTNSVGYSVVTDDYKVPAKKMRVLGNTDKEYIKKNLIGALLFDGGNTA--SDRRLKRTARRRYT | 73 |
| WP_050881965 | 1 | MNKP-YSIGLDIGTNSVGWSIITDDYKVPAKKMRVLGNTDKEYIKKNLIGALLFDGGNTA--ADRRLKRTARRRYT | 73 |
| WP_050886065 | 1 | MNKP-YSIGLDIGTNSVGWSIITDDYKVPAKKMRVLGNTDKEYIKKNLIGALLFDGGNTA--ADRRLKRTARRRYT | 73 |
| AHN30376 | 1 | MNKP-YSIGLDIGTNSVGWSIITDDYKVPAKKMRVLGNTDKEYIKKNLIGALLFDGGNTA--ADRRLKRTARRRYT | 73 |
| EAO78426 | 1 | MNKP-YSIGXDIGTNSVGWSIITDDYKVPAKKMRVLGNTDKEYIKKNLIGALLFDGGNTA--ADRRLKRTARRRYT | 73 |
| CCW42055 | 1 | MNKP-YSIGLDIGTNSVGWSIITDDYKVPAKKMRVLGNTDKEYIKKNLIGALLFDGGNTA--ADRRLKRIARRRYT | 73 |
| WP_003041502 | 1 | MNQK-YSIGLDIGTNSVGWAVITDDYKVPAKKMKVLGNTDKQSIKKNLLGALLFDSGETA--EATRLKRTARRRYT | 73 |
| WP_037593752 | 1 | MKKE-YSIGLDIGTNSVGWAVITDDYKVPAKKMKVLGNTDKQSIKKNLLGALLFDSGETA--EATRLKRTARRRYT | 74 |
| WP_049516684 | 1 | MKKE-YSIGLDIGTNSVGWAVITDDYKVPAKKMKVLGNTDKQSIKKNLLGALLFDSGETA--EATRLKRTARRRYT | 74 |
| GAD46167 | 1 | MKKE-YSIGLDIGTNSVGWAVITDDYKVPAKKMKVLGNTDKQSIKKNLLGALLFDSGETA--EATRLKRTARRRYT | 73 |
| WP_018363470 | 1 | MTKKnYSIGLDIGTNSVGWAVITDDYKVPAKKMKVLGNTDKKYIKKNLLGALLFDSGETA--EATRLKRTARRRYT | 74 |
| WP_003043819 | 1 | MEKK-YSIGLDIGTNSVGWAVITDDYKVPSKKFKVLGNTNRKSIKKNLMGALLFDSGETA--EATRLKRTARRRYT | 73 |
| WP_006269658 | 1 | MGKP-YSIGLDIGTNSVGWAVVTDDYKVPAKKMKVLGNTDKQSIKKNLLGALLFDSGETA--EATRLKRTARRRYT | 73 |
| WP_048800889 | 1 | MTQK-YSIGLDIGTNSVGWAIVIDDYKVPAKKMKILGNTNKQYIKKNLLGALLFDSGETA--KATRLKRTARRRYT | 73 |
| WP_012767106 | 1 | MDKK-YSIGLDIGTNSVGWAVITDDYKVPSKKFKVLGNTDRHSIKKNLIGALLFDSGETA--EATRLKRTARRRYT | 73 |
| WP_014612333 | 1 | MDKK-YSIGLDIGTNSVGWAVITDDYKVPSKKFKVLGNTDRHSIKKNLIGALLFDSGETA--EATRLKRTARRRYT | 73 |
| WP_015017095 | 1 | MDKK-YSIGLDIGTNSVGWAVITDDYKVPSKKFKVLGNTDRHSIKKNLIGALLFDSGETA--EATRLKRTARRRYT | 73 |
| WP_015057649 | 1 | MDKK-YSIGLDIGTNSVGWAVITDDYKVPSKKFKVLGNTDRHSIKKNLIGALLFDSGETA--EATRLKRTARRRYT | 73 |
| WP_048327215 | 1 | MDKK-YSIGLDIGTNSVGWAVITDDYKVPSKKFKVLGNTDRHSIKKNLIGALLFDSGETA--EATRLKRTARRRYT | 73 |
| WP_049519324 | 1 | MDKK-YSIGLDIGTNSVGWAVITDDYKVPSKKFKVLGNTDRHSIKKNLIGALLFDSGETA--EATRLKRTARRRYT | 73 |
| WP_012515931 | 1 | MKKP-YTIALDIGTNSVGWVVVTDDYRVPTKKMKVLGNTERKTIKKNLIGALLFDSGDTA--EGTRLKRTARRRYT | 73 |
| WP_021320964 | 1 | MKKP-YTIALDIGTNSVGWVVVTDDYRVPTKKMKVLGNTERKTIKKNLIGALLFDSGDTA--EGTRLKRTARRRYT | 73 |
| WP_037581760 | 1 | MKKP-YTIALDIGTNSVGWVVVTDDYRVPTKKMKVLGNTERKTIKKNLIGALLFDSGDTA--EGTRLKRTARPRYT | 73 |
| WP_004232481 | 1 | M-EKtYSIGLDIGTNSVGWAVITDDYKVPAKKMKVLGNTDKKYIKKNLLGALLFDSGETA--EATRLKRAARRRYT | 73 |
| WP_009854540 | 1 | MTKKNYSIGLDIGTNSVGWAVITDDYKVPAKKMKVLGNTDKKYIKKNLLGALLFDSGETA--EATRLKRTARRRYT | 74 |
| WP_012962174 | 1 | MTEKnYSIGLDIGTNSVGWAVITDDYKVPAKKMKVLGNTDKKYIKKNLLGALLFDNGETA--EATRLKRTARRRYT | 74 |
| WP_039695303 | 1 | MTKKNYSIGLDIGTNSVGWAVITDDYKVPAKKMKVLGNTDKKYIKKNLLGALLFDSGETA--EATRLKRTARRRYT | 74 |
| WP_014334983 | 1 | M-EKSYSIGLDIGTNSVGWAVITDDYKVPAKKMKVLGNTDKKYIKKNLLGALLFDSGETA--EVTRLKRTARRRYT | 73 |
| WP_003099269 | 1 | MRKP-YSIGLDIGTNSVGWAVITDDYKVPSKKMRIQGTTDRTSIKKNLIGALLFDNGETA--EATRLKRITRRRYT | 73 |
| AHY15608 | 1 | MRKP-YSIGLDIGTNSVGWAVITDDYKVPSKKMRIQGTTDRTSIKKNLIGALLFDNGETA--EATRLKRTTRRRYT | 73 |
| AHY17476 | 1 | MRKP-YSIGLDIGTNSVGWAVITDDYKVPSKKMRIQGTTDRTSIKKNLIGALLFDNGETA--EATRLKRTTRRRYT | 73 |
| ESR09100 | | --------------------------------------------------------------------------- | |
| AGM98575 | 1 | MRKP-YSIGLDIGTNSVGWAVITDDYKVPSKKMRIQGTTDRTSIKKNLIGALLFDNGETA--EATRLKRTTRRRYT | 73 |
| ALF27331 | 1 | MKKP-YSIGLDIGTNSVGWAVVTDDYKVPAKKMKVLGNTDKSHIKKNLLGALLFDSGNTA--EDRRLKRTARRRYT | 73 |
| WP_018372492 | 1 | MKKP-YSIGLDIGTNSVGWAVVMEDYKVPSKKMKVLGNTDKQSIKKNLIGALLFDSGETAV--ERRLNRTTSRRYD | 73 |
| WP_045618028 | 1 | NNKP-YSIGLDIGTNSVGWAVITDDYKVPSKKMKVLGNTDKHFIKKNLLGALLFDEGTTA--EDRRLKRTARRRYT | 74 |
| WP_045635197 | 1 | K-KG-YSIGLDIGTNSVGFAVITDDYKVPSKKMKVLGNTDKRFIKKNLIGALLFDEGTTA--EARRLKRTARRRYT | 73 |
| WP_002263549 | 1 | MKKP-YSIGLDIGTNSVGWAVVTDDYKVPAKKMKVLGNTDKSHIEKNLLGALLFDSGNTA--EDRRLKRTARRRYT | 73 |
| WP_002263887 | 1 | MKKP-YSIGLDIGTNSVGWAVVTDDYKVPAKKMKVLGNTDKSHIEKNLLGALLFDSGNTA--EDRRLKRTARRRYT | 73 |
| WP_002264920 | 1 | MKKP-YSIGLDIGTNSVGWAVVTDDYKVPAKKMKVLGNTDKSHIKKNLLGALLFDSGNTA--EDRRLKRTARRRYT | 73 |
| WP_002269043 | 1 | MKKP-YSIGLDIGTNSVGWAVVTDDYKVPAKKMKVLGNTDKSHIKKNLLGALLFDSGNTA--EDRRLKRTARRRYT | 73 |
| WP_002269448 | 1 | MKKP-YSIGLDIGTNSVGWAVVTDDYKVPAKKMKVLGNTDKSHIKKNLLGALLFDSGNTA--EDRRLKRTARRRYT | 73 |
| WP_002271977 | 1 | MKKP-YSIGLDIGTNSVGWAVVTDDYKVPAKKMKVLGNTDKSHIKKNLLGALLFDSGNTA--EDRRLKRTARRRYT | 73 |
| WP_002272766 | 1 | MKKP-YSIGLDIGTNSVGWAVVTDDYKVPAKKMKVLGNTDKSHIKKNLLGALLFDSGNTA--EDRRLKRTARRRYT | 73 |
| WP_002273241 | 1 | MKKP-YSIGLDIGTNSVGWAVVTDDYKVPAKKMKVLGNTDKSHIKKNLLGALLFDSGNTA--EDRRLKRTARRRYT | 73 |
| WP_002275430 | 1 | MKKP-YSIGLDIGTNSVGWAVVTDDYKVPAKKMKVLGNTDKSHIKKNLLGALLFDSGNTA--ADRRLKRTARRRYT | 73 |
| WP_002276448 | 1 | MKKP-YSIGLDIGTNSVGWAVVTDDYKVPAKKMKVLGNTDKSHIKKNLLGALLFDSGNTA--EDRRLKRTARRRYT | 73 |
| WP_002277050 | 1 | MKKS-YSIGLDIGTNSVGWAVVTDDYKVPAKKMKVLGNTDKSHIKKNLLGALLFDSGNTA--EDRRLKRTARRRYT | 73 |
| WP_002277364 | 1 | MKKP-YSIGLDIGTNSVGWAVVTDDYKVPAKKMKVLGNTDKSHIKKNLLGALLFDSGNTA--ADRRLKRTARRRYT | 73 |
| WP_002279025 | 1 | MKKP-YSIGLDIGTNSVGWAVVTDDYKVPAKKMKVLGNTDKSHIEKNLLGALLFDSGNTA--EDRRLKRTARRRYT | 73 |
| WP_002279859 | 1 | MKKP-YSIGLDIGTNSVGWAVVTDDYKVPAKKMKVLGNTDKSHIKKNLLGALLFDSGNTA--EDRRLKRTARRRYT | 73 |
| WP_002280230 | 1 | MKKP-YSIGLDIGTNSVGWAVVTDDYKVPAKKMKVLGNTDKSHIKKNLLGALLFDSGNTA--ADRRLKRTARRRYT | 73 |
| WP_002281696 | 1 | MKKP-YSIGLDIGTNSVGWAVVTDDYKVPAKKMKVLGNTDKSHIKKNLLGALLFDSGNTA--ADRRLKRTARRRYT | 73 |
| WP_002282247 | 1 | MKKP-YSIGLDIGTNSVGWAVVTDDYKVPAKKMKVLGNTDKSHIKKNLLGALLFDSGNTA--EDRRLKRTARRRYT | 73 |
| WP_002282906 | 1 | MKKP-YSIGLDIGTNSVGWSVVTDDYKVPAKKMKVLGNTDKSHIEKNLLGALLFDSGNTA--EDRRLKRTARRRYT | 73 |
| WP_002283846 | 1 | MKKP-YSIGLDIGTNSVGWAVVTDDYKVPAKKMKVLGNTDKSHIKKNLLGALLFDSGNTA--EDRRLKRTARRRYT | 73 |
| WP_002287255 | 1 | MKKP-YSIGLDIGTNSVGWAVVTDDYKVSAKKMKVLGNTDKSHIKKNLLGALLFDSGNTA--EDRRLKRTARRRYT | 73 |
| WP_002288990 | 1 | MKKP-YSIGLDIGTNSVGWAVVTDDYKVPAKKMKVLGNTDKSHIKKNLLGALLFDSGNTA--EDRRLKRTARRRYT | 73 |
| WP_002289641 | 1 | MKKP-YSIGLDIGTNSVGWAVVTDDYKVPAKKMKVLGNTDKSHIKKNLLGALLFDSGNTA--EDRRLKRTTRRRYT | 73 |
| WP_002290427 | 1 | MKKP-YSIGLDIGTNSVGWAVVTDDYKVPAKKMKVLGNTDKSHIKKNLLGALLFDSGNTA--EDRRLKRTARRRYT | 73 |
| WP_002295753 | 1 | MKKP-YSIGLDIGTNSVGWAVVTDDYKVPAKKMKVLGNTDKSHIKKNLLGALLFDSGNTA--EDRRLKRTARRRYT | 73 |
| WP_002296423 | 1 | MKKP-YSIGLDIGTNSVGWAVVTDDYKVPAKKMKVLGNTDKSHIKKNLLGALLFDSGNTA--EDRRLKRTARRRYT | 73 |
| WP_002304487 | 1 | MKKP-YSIGLDIGTNSVGWAVVTDDYKVPAKKMKVLGNTDKSHIKKNLLGALLFDSGNTA--EDRRLKRTARRRYT | 73 |
| WP_002305844 | 1 | MKKP-YSIGLDIGTNSVGWAVVTDDYKVPAKKMKVLGNTDKSHIKKNLLGALLFDSGNTA--EDRRLKRTARRRYT | 73 |
| WP_002307203 | 1 | MKKP-YSIGLDIGTNSVGWAVVTDDYKVPAKKMKVLGNTDKSHIKKNLLGALLFDSGNTA--EDRRLKRTARRRYT | 73 |
| WP_002310390 | 1 | MKKP-YSIGLDIGTNSVGWAVVTDDYKVPAKKMKVLGNTDKSHIKKNLLGALLFDSGNTA--EDRRLKRTARRRYT | 73 |
| WP_002352408 | 1 | MKKP-YSIGLDIGTNSVGWAVVTDDYKVPAKKMKVLGNTDKSHIKKNLLGALLFDSGNTA--EDRRLKRTARRRYT | 73 |
| WP_012997688 | 1 | MKKP-YSIGLDIGTNSVGWAVVTDDYKVPAKKMKVLGNTDKSHIKKNLLGALLFDSGNTA--ADRRLKRTARRRYT | 73 |
| WP_014677909 | 1 | MKKP-YSIGLDIGTNSVGWAVVTDDYKVPDKKMKVLGNTDKSHIKKNLLGALLFDSGNTA--EDRRLKRTARRRYT | 73 |
| WP_019312892 | 1 | MKKP-YSIGLDIGTNSVGWAVVTDDYKVPAKKMKVLGNTDKSHIKKNLLGALLFDSGNTA--ADRRLKRTARRRYT | 73 |
| WP_019313659 | 1 | MKKP-YSIGLDIGTNSVGWAVVTDDYKVPAKKMKVLGNTDKSHIEKNLLGALLFDSGNTA--EDRRLKRTARRRYT | 73 |
| WP_019314093 | 1 | MKKP-YSIGLDIGTNSVGWAVVTDDYKVPAKKMKVLGNTDKSHIKKNLLGALLFDSGNTA--EDRRLKRTARRRYT | 73 |
| WP_019315370 | 1 | MKKP-YSIGLDIGTNSVGWAVVTDDYKVPAKKMKVLGNTDKSHIKKNLLGALLFDSGNTA--EDRRLKRTARRRYT | 73 |
| WP_019803776 | 1 | MKKP-YSIGLDIGTNSVGWAVVTDDYKVPAKKMKVLGNTDKSHIEKNLLGALLFDSGNTA--EDRRLKRTARRRYT | 73 |
| WP_019805234 | 1 | MKKP-YSIGLDIGTNSVGWAVVTDDYKVPAKKMKVLGNTDKSHIKKNLLGALLFDSGNTA--EDRRLKRTARRRYT | 73 |
| WP_024783594 | 1 | MKKP-YSIGLDIGTNSVGWAVVTDDYKVPAKKMKVLGNTDKSHIEKNLLGALLFDSGNTA--EDRRLKRTARRRYT | 73 |
| WP_024784288 | 1 | MKKP-YSIGLDIGTNSVGWAVVTDDYKVPAKKMKVLGNTDKSHIKKNLLGALLFDSGNTA--EDRRLKRTARRRYT | 73 |
| WP_024784666 | 1 | MKKP-YSIGLDIGTNSVGWAVVTDDYKVPAKKMKVLGNTDKSHIKKNLLGALLFDSGNTA--ADRRLKRTARRRYT | 73 |
| WP_024784894 | 1 | MKKP-YSIGLDIGTNSVGWAVVTDDYKVPAKKMKVLGNTDKSHIKKNLLGALLFDSGNTA--EDRRLKRTTRRRYT | 73 |
| WP_024786433 | 1 | MKKP-YSIGLDIGTNSVGWAVVTDDYKVPAKKMKVLGNTDKSHIKKNLLGALLFDSGNTA--ADRRLKRTARRRYT | 73 |
| WP_049473442 | 1 | MKKP-YSIGLDIGTNSVGWAVVTDDYKVPAKKMKVLGNTDKSHIKKNLLGALLFDSGNTA--ADRRLKRTARRRYT | 73 |
| WP_049474547 | 1 | MKKP-YSIGLDIGTNSVGWAVVTDDYKVPAKKMKVLGNTDKSHIKKNLLGALLFDSGNTA--EDRRLKRTTRRRYT | 73 |
| EMC03581 | 1 | MDL--------IGTNSVGWAVVIDDYKVPAKKMKVLGNTDKSHIKKNLLGALLFDSGNTA--ADRRLKRTARRRYT | 66 |
| WP_000428612 | 1 | ENKN-YSIGLDIGTNSVGWAVITDDYKVPSKKMKVLGNTDKRFIKKNLIGALLFDEGTTA--EARRLKRTARRRYT | 74 |
| WP_000428613 | 1 | ENKN-YSIGLDIGTNSVGWSVITDDYKVPSKKMKVLGNTDKRFIKKNLIGALLFDEGTTA--EARRLKRTARRRYT | 74 |
| WP_049523028 | 1 | K-KP-YSIGLDIGTNSVGWAVITDDYKVPAKKMKVLGNINKESIKKNLIGALLFDAGNTA--ADRRLKRTARRRYT | 73 |
| WP_003107102 | 1 | --------------------------------MKVLGNTDRQTVKKNMIGTLLFDSGETA--EARRLKRTARRRYT | 42 |
| WP_054279288 | 1 | -KKS-YSIGLDIGTNSVGWAVITDDYKVPAKKMKVLGNTSRQSIKKNMIGALLFDEGGPA--ASTRVKRTTRRRYT | 75 |
| WP_049531101 | 1 | SNKP-YSIGLDIGTNSVGWAVITDDYKVPSKKMKVLGNTDKHFIKKNLIGALLFDEGTTA--EDRRLKRTARRRYT | 74 |
| WP_049538452 | 1 | SNKP-YSIGLDIGTNSVGWVIITDDYKVPSKKMKVLGNTDKHFIKKNLIGALLFDEGTTA--EDRRLKRTARRRYT | 74 |
| WP_049549711 | 1 | SNKP-YSIGLDIGTNSVGWAVITDDYKVPSKKMTVLGNTDKHFIKKNLIGALLFDEGTTA--EDRRLKRTARRRYT | 74 |
| WP_007896501 | 1 | --YS-YSIGLDIGTNSVGWAVINEDYKVPAKKMTVFGNTDRKTIKKNLLGTVLFDSGETA--QARRLKRINRRRYT | 75 |
| EFR44625 | 1 | -----------------------------------------------MLGTVLFDSGETA--QARRLKRTNRRRYT | 27 |
| WP_002897477 | 1 | K-KP-YSIGLDIGTNSVGWAVVTDDYKVPAKKMRVFGDTDRSHIKKNLLGTLLFDDGNTA--ESRRLKRTARRRYT | 73 |
| WP_002906454 | 1 | K-KP-YSIGLDIGTNSVGWAVITDDYKVPSKKMKVLGNTDKHFIKKNLIGALLFDEGTTA--EDRRLKRTSRRRYT | 73 |
| WP_009729476 | 1 | ENKN-YSIGLDIGTNSVGWSVITDDYKVPSKKMKVLGNTDKHFIKKNLIGALLFDEGTTA--EARRLKRTARRRYT | 74 |
| CQR24647 | 1 | MKKP-YSIGLDIGTNSVGWSVVTDDYKVPAKKMKVLGNTDKEYIKKNLIGALLFDSGETA--EATRMKRTARRRYT | 73 |
| WP_000066813 | 1 | SNKS-YSIGLDIGTNSVGWAVITDDYKVPSKKMKVLGNTDKHFIKKNLIGALLFDEGTTA--EDRRLKRTARRRYT | 74 |
| WP_009754323 | 1 | NNNN-YSIGLDIGTNSVGWAVITDDYKVPSKKMRVLGNTDKRFIKKNLIGALLFDEGTTA--EDRRLKRTARRRYT | 74 |
| WP_044674937 | 1 | MKKK-YAIGIDIGTNSVGWSVVIDDYKVPSKKMKVFGNTEKRYIKKNLLGTLLFDEGNTA--ENRRLKRTARRRYT | 73 |
| WP_044676715 | 1 | MKKK-YAIGIDIGTNSVGWSVVTDDYKVPSKKMKVFGNTEKRYIKKNLLGTLLFDEGNTA--ENRRLKRTARRRYT | 73 |
| WP_044680361 | 1 | MKKK-YAIGIDIGTNSVGWSVVTDDYKVPSKKMKVFGNTEKRYIKKNLLGTLLFDEGNTA--ENRRLKRTARRRYT | 73 |
| WP_044681799 | 1 | MKKK-YAIGIDIGTNSVGWSVVTDDYKVPSKKMKVFGNTEKRYIKKNLLGTLLFDEGNTA--ENRRLKRTARRRYT | 73 |
| WP_049533112 | 1 | MDQK-YSIGLDIGTNSVGWAVVTDDYKVPAKKMKVLGNTDKQSIKKNLLGALLFDSGETA--EATRLKRTARRRYT | 73 |
| WP_029090905 | 1 | -----------------------------------------------MWGVSLFEAGKTA--AERRGYRSTRRRLN | 27 |
| WP_006506696 | 1 | I-VD-YCIGLDLGTGSVGWAVVDMNHRLMKRN------------GKHLWGSRLFSNAETA--ANRRASRSIRRRYN | 60 |
| AIT42264 | 1 | MDKK-YSIGLDIGTNSVGWAVITDEYKVPSKKFKVLGNTDRHSIKKNLIGALLFDSGETA--EATRLKRTARRRYT | 73 |
| WP_034440723 | 1 | -MKN-YTIGLDIGTNSVGWAVIKDDLTLVRKKIKISGNTDKKEVKKNLWGSFLFEQGDTA--QDTRVKRIARRRYE | 72 |
| AKQ21048 | 1 | MDKK-YSIGLDIGTNSVGWAVITDEYKVPSKKFKVLGNTDRHSIKKNLIGALLFDSGETA--EATRLKRTARRRYT | 73 |
| WP_004636532 | 1 | MQKN-YTIGLDIGTNSVGWAVMKDDYTLIRKRMKVLGNTDIKKIKKNFWGVRLFDEGETA--KETRLKRGTRRRYQ | 73 |
| WP_002364836 | 1 | MKKD-YVIGLDIGTNSVGWAVMTEDYQLVKKKMPIYGNTEKKKIKKNFWGVRLFEEGHTA--EDRRLKRTARRRIS | 73 |
| WP_016631044 | 1 | --------------------------------------------------MRLFEEGHTA--EDRRLKRTARRRIS | 24 |
| EMS75795 | | ---------------------------------------------------------------------------- | |
| WP_002373311 | 1 | MKKD-YVIGLDIGTNSVGWAVMTEDYQLVKKKMPIYGNTEKKKIKKNFWGVRLFEEGHTA--EDRRLKRTARRRIS | 73 |
| WP_002378009 | 1 | MKKD-YVIGLDIGTNSVGWAVMTEDYQLVKKKMPIYGNTEKKKIKKNFWGVRLFEEGHTA--EDRRLKRTARRRIS | 73 |
| WP_002407324 | 1 | MKKD-YVIGLDIGTNSVGWAVMTEDYQLVKKKMPIYGNTEKKKIKKNFWGVRLFEEGHTA--EDRRLKRTARRRIS | 73 |
| WP_002413717 | 1 | MKKD-YVIGLDIGTNSVGWAVMTEDYQLVKKKMPIYGNTEKKKIKKNFWGVRLFEEGHTA--EDRRLKRTARRRIS | 73 |
| WP_010775580 | 1 | MKKD-YVIGLDIGTNSVGWAVMTEDYQLVKKKMPIYGNTEKKKIKKNFWGVRLFEEGHTA--EDRRLKRTARRRIS | 73 |
| WP_010818269 | 1 | MKKD-YVIGLDIGTNSVGWAVMTEDYQLVKKKMPIYGNTEKKKIKKNFWGVRLFEEGHTA--EDRRLKRTARRRIS | 73 |
| WP_010824395 | 1 | MKKD-YVIGLDIGSNSVGWAVMTEDYQLVKKKMPIYGNTEKKKIKKNFWGVRLFEEGHTA--EDRRLKRTARRRIS | 73 |
| WP_016622645 | 1 | MKKD-YVIGLDIGTNSVGWAVMTEDYQLVKKKMPIYGNTEKKKIKKNFWGVRLFEEGHTA--EDRRLKRTARRRIS | 73 |
| WP_033624816 | 1 | MKKD-YVIGLDIGTNSVGWAVMTEDYQLVKKKMPIYGNTEKKKIKKNFWGVRLFEEGHTA--EDRRLKRTARRRIS | 73 |
| WP_033625576 | 1 | MKKD-YVIGLDIGTNSVGWAVMTEDYQLVKKKMPIYGNTEKKKIKKNFWGVRLFEEGHTA--EDRRLKRTARRRIS | 73 |
| WP_033789179 | 1 | MKKD-YVIGLDIGTNSVGWAVMTEDYQLVKKKMPIYGNTEKKKIKKNFWGVRLFEEGHTA--EDRRLKRTARRRIS | 73 |
| WP_002310644 | 1 | MKKE-YTIGLDIGTNSVGWSVLTDDYRLVSKKMKVAGNTEKSSTKKNFWGVRLFDEGQTA--EARRSKRTARRRLA | 73 |
| WP_002312694 | 1 | MKKE-YTIGLDIGTNSVGWSVLTDDYRLVSKKMKVAGNTEKSSTKKNFWGVRLFDEGQTA--EARRSKRTARRRLA | 73 |
| WP_002314015 | 1 | MKKE-YTIGLDIGTNSVGWSVLTDDYRLVSKKMKVAGNTEKSSTKKNFWGVRLFDEGQTA--EARRSKRTARRRLA | 73 |
| WP_002320716 | 1 | MKKE-YTIGLDIGTNSVGWSVLTDDYRLVSKKMKVAGNTEKSSTKKNFWGVRLFDEGQTA--EARRSKRTARRRLA | 73 |
| WP_002330729 | 1 | MKKE-YTIGLDIGTNSVGWSVLTDDYRLVSKKMKVAGNTEKSSTKKNFWGVRLFDEGQTA--EARRSKRTARRRLA | 73 |
| WP_002335161 | 1 | MKKE-YTIGLDIGTNSVGWSVLTDDYRLVSKKMKVAGNTEKSSTKKNFWGVRLFDEGQTA--EARRSKRTARRRLA | 73 |
| WP_002345439 | 1 | MKKE-YTIGLDIGTNSVGWSVLTDDYRLVSKKMKVAGNTEKSSTKKNFWGVRLFDEGQTA--EARRSKRTARRRLA | 73 |
| WP_034867970 | 1 | MTKD-YTIGLDIGTNSVGWAVLTDDYQLMKRKMSVHGNTEKKKIKKNEWGARLFDEGQTA--EFRRTKRINRRRLA | 73 |
| WP_047937432 | 1 | MKKE-YTIGLDIGTNSVGWSVLTDDYRLVSKKMKVAGNTEKSSTKKNFWGVRLFDEGQTA--EARRSKRTARRRLA | 73 |
| WP_010720994 | 1 | MTKD-YTIGLDIGTNSVGWAVLTDDYQLMKRKMSVHGNTEKKKIKKNFWGARLFDEGQTA--EFRRTKRINRRRLA | 73 |
| WP_010737004 | 1 | MTKD-YTIGLDIGTNSVGWAVLTDDYQLMKRKMSVHGNTEKKKIKKNFWGARLFDEGQTA--EFRRTKRINRRRLA | 73 |
| WP_034700478 | 1 | MTKD-YTIGLDIGTNSVGWAVLTDDYQLMKRKMSVHGNTEKKKIKKNFWGARLFDEGQTA--EFRRTKRINRRRLA | 73 |
| WP_007209003 | 1 | MKND-YTIGLDIGTNSVGYSVVTDDYKVISKKMNVFGNTEKKSIKKNFWGVRLFESGOTA--QEARMKRTSRRRIA | 73 |
| WP_023519017 | 1 | MEKE-YTIGLDIGTNSVGWAVLTDDYRLVARKMSIQGDSNRKKIKKNFWGARLFEEGKTA--QFRRIKRTNRRRIA | 73 |
| WP_010770040 | 1 | MKKE-YTIGLDIGTNSVGWAVLTENYDLVKKKMKVYGNTETKYLKKNLWGVRLFDEGETA--ADRRLKRTTRRRYS | 73 |
| WP_048604708 | 1 | MGKE-YTIGLDIGTNSVGWAVLQEDLDLVRRKMKVYGNTEKNYLKKNFWGVDLFDEGMTA--KDTRLKRTTRRRYF | 73 |
| WP_010750235 | 1 | MNKA-YTLGLDIGTNSVGWAVVTDDYRLMAKKMPVHSKMEKKKIKKNEWGARLFDEGQTA--EERRNKRATRRRLR | 73 |
| AII16583 | 1 | ADKK-YSIGLDIGTNSVGWAVITDEYKVPSKKFKVLGNTDRHSIKKNLIGALLFDSGETA--EATRLKRTARRRYT | 112 |
| WP_029073316 | 1 | NNKI-YNIGLDIGDASVGWAVVDEHYNLLKRH------------GKHMWGSRLFTQANTA--VERRSSRSTRRRYN | 65 |
| WP_031589969 | 1 | NNKI-YNIGLDIGDASVGWAVVDEHYNLLKRH------------GKHMWGSRLFTQANTA--VERRSSRSTRRRYN | 65 |
| KDA45870 | 1 | LKKD-YSIGLDIGTNSVGHAVVIDDYKVPTKKMKVFGDISKKTIKKNMLGVLLFNEGQTA--ADTRLKRGARRRYT | 74 |
| WP_039099354 | 1 | MSRP-YNIGLDIGTSSIGWSVVDDQSKLVSVR------------GKYGYGVRLYDEGQTA--AERRSFRTTRRRLK | 61 |
| AKP02966 | 1 | KEQP-YNIGLDIGTGSVGWAVINDNYDLLNIK------------KKNLWGVRLFEGAQTA--KETRLNRSTRRRYR | 64 |
| WP_010991369 | 1 | MKKP-YTIGLDIGTNSVGWAVLTDQYDLVKRKMKIAGDSEKKQIKKNFWGVRLFDEGQTA--ADRRMARTARRRIE | 73 |
| WP_033838504 | 1 | MKKP-YTIGLDIGTNSVGWAVLTDQYDLVKRKMKIAGDSEKKQIKKNFWGVRLFDEGQTA--ADRRMARTARRRIE | 73 |
| EHN60060 | 1 | MKKP-YTIGLDIGTNSVGWAVLTDQYDLVKRKMKIAGDSEKKQIKKNFWGVRLFDEGQTA--ADRRMARTARRRIE | 76 |
| EFR89594 | | ---------------------------------------------------------------------------- | |
| WP_038409211 | 1 | MRKP-YTIGLDIGTNSVGWAVLTDQYNLVKRKMKVAGSAEKKQIKKNFWGVRLFDEGEVA--AGRRMNRTTRRRIE | 73 |
| EFR95520 | | ---------------------------------------------------------------------------- | |
| WP_003723650 | 1 | MKNP-YTIGLDIGTNSVGWAVLINQYDLVKRKMKVAGNSDKKQIKKNFWGVRLFDDGQTA--VDRRMNRTARRRIE | 73 |
| WP_003727705 | 1 | MKNP-YTIGLDIGTNSVGWAVLTDQYDLVKRKMKVAGNSDKKQIKKNFWGVRLFDDGQTA--VDRRMNRTARRRIE | 73 |
| WP_003730785 | 1 | MKNP-YTIGLDIGTNSVGWAVLTDQYDLVKRKMKVAGNSDKKQIKKNFWGVRLFDDGQTA--VDRRMNRTARRRIE | 73 |
| WP_003733029 | 1 | MKKP-YTIGLDIGTNSVGWAVLTDQYDLVKRKMKISGDSEKKQIKKNFWGVRLFEKGETA--AKRRMSRTARRRIE | 73 |
| WP_003739838 | 1 | MKNP-YTIGLDIGTNSVGWAVLTDQYDLVKRKMKVAGNSDKKQIKKNFWGVRLFDEGETA--ADRRMNRTARRRIE | 73 |
| WP_014601172 | 1 | MKNP-YTIGLDIGTNSVGWAVLINQYDLVKRKMKVAGNSDKKQIKKNFWGVRLFDDGQTA--VDRRMNRTARRRIE | 73 |
| WP_023548323 | 1 | MKNP-YTIGLDIGTNSVGWAVLINQYDLVKRKMKVAGNSDKKQIKKNFWGVRLFDDGQTA--VDRRMNRTARRRIE | 73 |
| WP_031665337 | 1 | MKNP-YTIGLDIGTNSVGWAVLTDQYDLVKRKMKVAGNSDKKQIKKNFWGVRLFDDGQTA--VDRRMNRTARRRIE | 73 |
| WP_031669209 | 1 | MKKP-YTIGLDIGTNSVGWAVLTDQYDLVKRKMKISGDSEKKQIKKNFWGVRLFEKGETA--AKRRMSRTARRRIE | 73 |
| WP_033920898 | 1 | MKNP-YTIGLDIGTNSVGWAVLTNQYDLVKRKMKVAGNSDKKQIKKNFWGVRLFDDGQTA--VDRRMNRTARRRIE | 73 |
| AKI42028 | 1 | MKNP-YTIGLDIGTNSVGWAVLTNQYDLVKRKMKVAGNSDKKQIKKNFWGVRLFDDGQTA--VDRRMNRTARRRIE | 76 |
| AKI50529 | 1 | MKNP-YTIGLDIGTNSVGWAVLTNQYDLVKRKMKVAGNSDKKQIKKNFWGVRLFDDGQTA--VDRRMNRTARRRIE | 76 |
| EFR83390 | | ---------------------------------------------------------------------------- | |
| WP_046323366 | 1 | MKKP-YTIGLDIGTNSVGWAALTDQYDLVKRKMKVAGNSEKKQIKKNLWGVRLVDEGKTA--AHRRVNRTTRRRIE | 73 |
| AKE81011 | 1 | ADKK-YSIGLDIGTNSVGWAVITDEYKVPSKKFKVLGNTDRHSIKKNLIGALLFDSGETA--EATRLKRTARRRYT | 89 |
| CUO82355 | 1 | I-VD-YCIGLDLGTGSVGWAVVDMNHRLMKRN------------GKHLWGSRLFSNAETA--ATRRSSRSIRRRYN | 64 |
| WP_033162887 | 1 | KDIR-YSIGLDIGTNSVGWAVMDEHYELLKKG------------NHHMWGSRLFDAAEPA--ATRRASRSIRRRYN | 65 |
| AGZ01981 | 1 | ADKK-YSIGLDIGTNSVGWAVITDEYKVPSKKFKVLGNTDRHSIKKNLIGALLFDSGETA--EATRLKRTARRRYT | 106 |
| AKA60242 | 1 | MDKK-YSIGLAIGTNSVGWAVITDEYKVPSKKFKVLGNTDRHSIKKNLIGALLFDSGETA--EATRLKRTARRRYT | 73 |
| AKS40380 | 1 | MDKK-YSIGLDIGTNSVGWAVITDEYKVPSKKFKVLGNTDRHSIKKNLIGALLFDSGETA--EATRLKRTARRRYT | 73 |
| 4UN5_B | 1 | MDKK-YSIGLAIGTNSVGWAVITDEYKVPSKKFKVLGNTDRHSIKKNLIGALLFDSGETA--EATRLKRTARRRYT | 77 |
| WP_010922251 | 74 | [chemical structure] | 143 |
| WP_039695303 | 75 | RRKNRLRYLQEIFANEIAKVDESFFQRLDE-SFLT--DDDKT---F DSHPIFGNKA-EEDAYHQKFPTIYHLRKHLA | 144 |
| WP_045635197 | 74 | RRKNRLRYLQEIFSEEMSKVDSSFFHRLDD-SFLI--PEDKR---E SKYPIFATLT-EEKEYHKQFPTIYHLRKQLA | 143 |
| 5AXW_A | 62 | RRRHRIQRVKKLLFD---------YNLLTDhSELS----------G --NPYEARVK--------------GLSQKLS | 104 |
| WP_009880683 | | ---------------------------------------------- ------------------------------- | |
| WP_010922251 | 74 | RRKNRICYLQEIFSNEMAKVDDSFFHRLEE-SFLV--EEDKK---H ERHPIFGNIV-DEVAYHEKYPTIYHLRKKLV | 143 |
| WP_011054416 | 74 | RRKNRICYLQEIFSNEMAKVDDSFFHRLEE-SFLV--EEDKK---H ERHPIFGNIV-DEVAYHEKYPTIYHLRKKLA | 143 |
| WP_011284745 | 74 | RRKNRICYLQEIFSNEMAKVDDSFFHRLEE-SFLV--EEDKK---H ERHPIFGNIV-DEVAYHEKYPTIYHLRKKLV | 143 |
| WP_011285506 | 74 | RRKNRICYLQEIFSNEMAKVDDSFFHRLEE-SFLV--EEDKK---H ERHPIFGNIV-DEVAYHEKYPTIYHLRKKLV | 143 |
| WP_011527619 | 74 | RRKNRICYLQEIFSNEMAKVDDSFFHRLEE-SFLV--EEDKK---H ERHPIFGNIV-DEVAYHEKYPTIYHLRKKLV | 143 |
| WP_012560673 | 74 | RRKNRICYLQEIFSNEIAKVDDSFFHRLEE-SFLV--EEDKK---H ERHPIFGNIV-DEVAYHEKYPTIYHLRKKLA | 143 |
| WP_014407541 | 74 | RRKNRICYLQEIFSNEMAKVDDSFFHRLEE-SFLV--EEDKK---H ERHPIFGNIV-DEVAYHEKYPTIYHLRKKLA | 143 |
| WP_020905136 | 74 | RRKNRICYLQEIFSNEMAKVDDSFFHRLEE-SFLV--EEDKK---H ERHPIFGNIV-DEVAYHEKYPTIYHLRKKLV | 143 |
| WP_023080005 | 74 | RRKNRICYLQEIFSNEMAKVDDSFFHRLEE-SFLV--EEDKK---H ERHPIFGNIV-DEVAYHEKYPTIYHLRKKLA | 143 |
| WP_023610282 | 74 | RRKNRICYLQEIFSNEMAKVDDSFFHRLEE-SFLV--EEDKK---H ERHPIFGNIV-DEVAYHEKYPTIYHLRKKLA | 143 |
| WP_030125963 | 74 | RRKNRICYLQEIFSNEMAKVDDSFFHRLEE-SFLV--EEDKK---H ERHPIFGNIV-DEVAYHEKYPTIYHLRKKLA | 143 |
| WP_030126706 | 74 | RRKNRICYLQEIFSNEMAKVDDSFFHRLEE-SFLV--EEDKK---H ERHPIFGNIV-DEVAYHEKYPTIYHLRKKLA | 143 |
| WP_031488318 | 74 | RRKNRICYLQEIFSNEMAKVDDSFFHRLEE-SFLV--EEDKK---H ERHPIFGNIV-DEVAYHEKYPTIYHLRKKLA | 143 |
| WP_032460140 | 74 | RRKNRICYLQEIFSNEIAKVDDSFFHRLEE-SFLV--EEDKK---H ERHPIFGNIV-DEVAYHEKYPTIYHLRKKLA | 143 |
| WP_032461047 | 74 | RRKNRICYLQEIFSNEIAKVDDSFFHRLEE-SFLV--EEDKK---H ERHPIFGNIV-DEVAYHEKYPTIYHLRKKLA | 143 |
| WP_032462016 | 74 | RRKNRICYLQEIFSNEMAKVDDSFFHRLEE-SFLV--EEDKK---H ERHPIFGNIV-DEVAYHEKYPTIYHLRKKLV | 143 |
| WP_032462936 | 74 | RRKNRICYLQEIFSNEMAKVDDSFFHRLEE-SFLV--EEDKK---H ERHPIFGNIV-DEVAYHEKYPTIYHLRKKLA | 143 |
| WP_032464890 | 74 | RRKNRICYLQEIFSNEMAKVDDSFFHRLEE-SFLV--EEDKK---H ERHPIFGNIV-DEVAYHEKYPTIYHLRKKLV | 143 |
| WP_033888930 | | ---------------------------------------------- ------------------------------- | |
| WP_038431314 | 74 | RRKNRICYLQEIFSNEMAKVDDSFFHRLEE-SFLV--EEDKK---H ERHPIFGNIV-DEVAYHEKYPTIYHLRKKLA | 143 |
| WP_038432938 | 74 | RRKNRICYLQEIFSNEMAKVDDSFFHRLEE-SFLV--EEDKK---H ERHPIFGNIV-DEVAYHEKYPTIYHLRKKLA | 143 |
| WP_038434062 | 74 | RRKNRICYLQEIFSNEMAKVDDSFFHRLEE-SFLV--EEDKK---H ERHPIFGNIV-DEVAYHEKYPTIYHLRKKLA | 143 |
| BAQ51233 | 1 | ----------------MAKVDDSFFHRLEE-SFLV--EEDKK---H ERHPIFGNIV-DEVAYHEKYPTIYHLRKKLV | 54 |
| KGE60162 | | ---------------------------------------------- ------------------------------- | |
| KGE60856 | | ---------------------------------------------- ------------------------------- | |
| WP_002989955 | 74 | RRKNRICYLQEIFSNEMAKVDDSFFHRLEE-SFLV--EEDKK---H ERHPIFGNIV-DEVAYHEKYPTIYHLRKKLV | 143 |
| WP_003030002 | 74 | RRRNRLRYLQEIFAEEMNKVDENFFQRLDD-SELV--DEDKR---G ERHPIFGNIA-AEVKYHDDFPTIYHLRKHLA | 143 |
| WP_003065552 | 75 | RRKNRLRYLQEIFAEEMTKVDESFFQRLDE-SFLRwdDDNKK---L GRYPIFGNIA-DVVKYHQEFPTIYHLRKHLA | 146 |
| WP_001040076 | 74 | RRRNRILYLQEIFAEEMSKVDDSFFHRLED-SFLV--EEDKR---G SKYPIFATLQ-EEKYYHEKFPTIYHLRKELA | 143 |
| WP_001040078 | 74 | RRRNRILYLQEIFAEEMSKVDDSFFHRLED-SFLV--EEDKR---G SKYPIFATLQ-EEKDYHEKFPTIYHLRKELA | |
| WP_001040080 | 74 | RRRNRILYLQEIFAEEMSKVDDSFFHRLED-SFLV--EEDKR---G SKYPIFATLQ-EEKDYHEKFSTIYHLRKELA | 143 |
| WP_001040081 | 74 | RRRNRILYLQEIFAEEMSKVDDSFFHRLED-SFLV--EEDKR---G SKYPIFATLQ-EEKDYHEKFSTIYHLRKELA | 143 |
| WP_001040083 | 74 | RRRNRILYLQEIFAEEMSKVDDSFFHRLED-SFLV--EEDKR---G SKYPIFATLQ-EEKDYHEKFSTIYHLRKELA | 143 |
| WP_001040085 | 74 | RRRNRILYLQEIFAEEMSKVDDSFFHRLED-SFLV--EEDKR---G SKYPIFATLQ-EEKDYHEKFSTIYHLRKELA | 143 |
| WP_001040087 | 74 | RRRNRILYLQEIFAEEMSKVDDSFFHRLED-SFLV--EEDKR---G SKYPIFATLQ-EEKDYHEKFSTIYHLRKELA | 143 |
| WP_001040088 | 74 | RRRNRILYLQEIFAEEMSKVDDSFFHRLED-SFLV--EEDKR---G SKYPIFATLQ-EEKDYHEKFSTIYHLRKELA | 143 |
| WP_001040089 | 74 | RRRNRILYLQEIFAEEMSKVDDSFFHRLED-SELV--EEDKR---G SKYPIFATLQ-EEKDYHEKFSTIYHLRKELA | 143 |
| WP_001040090 | 74 | RRRNRILYLQEIFAEEMSKVDDSFFHRLED-SFLV--EEDKR---G SKYPIFATLQ-EEKDYHEKFSTIYHLRKELA | 143 |
| WP_001040091 | 74 | RRRNRILYLQEIFAEEMSKVDDSFFHRLED-SFLV--EEDKR---G SKYPIFATLQ-EEKDYHEKFSTIYHLRKELA | 143 |
| WP_001040092 | 74 | RRRNRILYLQEIFAEEMSKVDDSFFHRLED-SELV--EEDKR---G SKYPIFATMQ-EEKDYHEKFPTIYHLRKELA | 143 |
| WP_001040094 | 74 | RRRNRILYLQEIFAEEMSKVDDSFFHRLED-SFLV--EEDKR---G SKYPIFATMQ-EEKYYHEKFPTIYHLRKELA | 143 |
| WP_001040095 | 74 | RRRNRILYLQEIFAEEMSKVDDSFFHRLED-SELV--EEDKR---G SKYPIFATMQ-EEKYYHEKFPTIYHLRKELA | 143 |
| WP_001040096 | 74 | RRRNRILYLQEIFAEEMSKVDDSFFHRLED-SFLV--EEDKR---G SKYPIFATMQ-EEKYYHEKFPTIYHLRKELA | 143 |
| WP_001040097 | 74 | RRRNRILYLQEIFAEEMSKVDDSFFHRLED-SFLV--EEDKR---G SKYPIFATMQ-EEKYYHEKFPTIYHLRKELA | 143 |
| WP_001040098 | 74 | RRRNRILYLQEIFAEEMSKVDDSFFHRLED-SFLV--EEDKR---G SKYPIFATMQ-EEKYYHEKFPTIYHLRKELA | 143 |
| WP_001040099 | 74 | RRRNRILYLQEIFAEEMSKVDDSFFHRLED-SFLV--EEDKR---G SKYPIFATMQ-EEKYYHEKFPTIYHLRKELA | 143 |
| WP_001040100 | 74 | RRRNRILYLQEIFAEEMSKVDDSFFHRLED-SFLV--EEDKR---G SKYPIFATMQ-EEKYYHEKFPTIYHLRKELA | 143 |
| WP_001040104 | 74 | RRRNRILYLQEIFAEEMSKVDDSFFHRLED-SFLV--EEDKR---G SKYXIFATLQ-EEKDYHEKFSTIYHLRKELA | 143 |
| WP_001040105 | 74 | RRRNRILYLQEIFAEEMSKVDDSFFHRLED-SELV--EEDKR---G SKYPIFATLQ-EEKDYHEKFSTIYHLRKELA | 143 |
| WP_001040106 | 74 | CRRNRILYLQEIFAEEMSKVDDSFFHRLED-SFLV--EDDKR---G SKYPIFATMQ-EEKDYHEKFPTIYHLRKELA | 143 |
| WP_001040107 | 74 | RRRNRILYLQEIFAEEMSKVDDSFFHRLED-SFLV--EDDKR---G SKYPIFATMQ-EEKDYHEKFPTIYHLRKELA | 143 |
| WP_001040108 | 74 | RRRNRILYLQEIFAEEMSKVDDSFFHRLED-SFLV--EDDKR---G SKYPIFATMQ-EEKDYHEKFPTIYHLRKELA | 143 |
| WP_001040109 | 74 | RRRNRILYLQEIFAEEMSKVDDSFFHRLED-SELV--EDDKR---G SKYPIFATMQ-EEKDYHEKFPTIYHLRKELA | 143 |
| WP_001040110 | 74 | RRRNRILYLQEIFAEEMSKVDDSFFHRLED-SELV--EDDKR---G SKYPIFATMQ-EEKDYHEKFPTIYHLRKELA | 143 |
| WP_015058523 | 74 | RRRNRILYLQEIFAEEMSKVDDSFFHRLED-SFLV--EEDKR---G SKYPIFATMQ-EEKDYHEKFPTIYHLRKELA | 143 |
| WP_017643650 | 74 | RRRNRILYLQEIFAEEMSKVDDSFFHRLED-SFLV--EEDKR---G SKYPIFATMQ-EEKDYHEKFPTIYHLRKELA | 143 |
| WP_017647151 | 74 | RRRNRILYLQEIFAEEMSKVDDSFFHRLED-SFLV--EDDKR---G SKYPIFATMQ-EEKDYHEKFPTIYHLRKELA | 143 |
| WP_017648376 | 74 | RRRNRILYLQEIFAEEMSKVDDSFFHRLED-SELV--EDDKR---G SKYPIFATMQ-EEKDYHEKFPTIYHLRKELA | 143 |
| WP_017649527 | 74 | RRRNRILYLQEIFAEEMSKVDDSFFHRLED-SELV--EEDKR---G SKYPIFATLQ-EEKDYHEKFPTIYHLRKELA | 143 |
| WP_017771611 | 74 | RRRNRILYLQEIFAEEMSKVDDSFFHRLED-SELV--EDDKR---G SKYPIFATMQ-EEKDYHEKFPTIYHLRKELA | 143 |
| WP_017771984 | 74 | RRRNRILYLQEIFAEEMSKVDDSFFHRLED-SFLV--EEDKR---G SKYPIFATLQ-EEKDYHEKFSTIYHLRKELA | 143 |
| CFQ25032 | 74 | RRRNRILYLQEIFAEEMSKVDDSFFHRLED-SFLV--EEDKR---G SKYPIFATLQ-EEKDYHEKFSTIYHLRKELA | 143 |
| CFV16040 | 74 | RRRNRILYLQEIFAEEMSKVDDSFFHRLED-SFLV--EEDKR---G SKYPIFATLQ-EEKDYHEKFSTIYHLRKELA | 143 |
| KLJ37842 | 74 | RRRNRILYLQEIFAEEMSKVDDSFFHRLED-SFLV--EEDKR---G SKYPIFATLQ-EEKDYHEKFSTIYHLRKELA | 143 |
| KLJ72361 | 74 | RRRNRILYLQEIFAEEMSKVDDSFFHRLED-SFLV--EEDKR---G SKYPIFATLQ-EEKDYHEKFSTIYHLRKELA | 143 |
| KLL20707 | 74 | RRRNRILYLQEIFAEEMSKVDDSFFHRLED-SFLV--EEDKR---G SKYPIFATLQ-EEKDYHEKFSTIYHLRKELA | 143 |
| KLL42645 | 74 | RRRNRILYLQEIFAEEMSKVDDSFFHRLED-SFLV--EDDKR---G SKYPIFATMQ-EEKDYHEKFPTIYHLRKELA | 143 |
| WP_047207273 | 74 | RRRNRILYLQEIFAEEMSKVDDSFFHRLED-SELV--EEDKR---G SKYPIFATLQ-EEKDYHEKFSTIYHLRKELA | 143 |
| WP_047209694 | 74 | RRRNRILYLQEIFAEEMSKVDDSFFHRLED-SFLV--EEDKR---G SKYPIFATMQ-EEKYYHEKFPTIYHLRKELA | 143 |
| WP_050198062 | 74 | RRRNRILYLQEIFAEEMSKVDDSFFHRLED-SFLV--EEDKR---G SKYPIFATLQ-EEKDYHEKFSTIYHLRKELA | 143 |
| WP_050201642 | 74 | RRRNRILYLQEIFAEEMSKVDDSFFHRLED-SELV--EEDKR---G SKYPIFATLQ-EEKDYHEKFSTIYHLRKELA | 143 |
| WP_050204027 | 74 | RRRNRILYLQEIFAEEMSKVDDSFFHRLED-SFLV--EDDKR---G SKYPIFATMQ-EEKDYHEKFPTIYHLRKELA | 143 |
| WP_050881965 | 74 | RRRNRILYLQEIFAEEMSKVDDSFFHRLED-SFLV--EEDKR---G SKYPIFATlQ-EEKDYHEKFPTIYHLRKELA | 143 |
| WP_050886065 | 74 | RRRNRILYLQEIFAEEMSKVDDSFFHRLED-SFLV--EEDKR---G SKYPIFATLQ-EEKDYHEKFSTIYHLRKELA | 143 |
| AHN30376 | 74 | RRRNRILYLQEIFAEEMSKVDDSFFHRLED-SFLV--EEDKR---G SKYPIFATMQ-EEKDYHEKFPTIYHLRKELA | 143 |
| EAO78426 | 74 | RRRNRILYLQEIFAEEMSKVDDSFFHRLED-SELV--EEDKR---G SKYPIFATLQ-EEKDYHEKFSTIYHLRKELA | 143 |
| CCW42055 | 74 | RRRNRILYLQEIFAEKMSKVDDSFFHRLED-SFLV--EEDKR---G SKYPIFATLQ-EEKDYHEKFPTIYHLRKELA | 143 |
| WP_003041502 | 74 | RRRNRLRYLQEIFAEEMMQVDESFFQRLDD-SFLV--DEDKR---G ERHPIFGNIA-AEVKYHDEFPTIYHLRKHLA | 143 |
| WP_037593752 | 75 | RRKNRLRYLQEIFTEEMNKVDENFFQRLDD-SFLV--EEDKQ---G SKYPIFGTLK-EEKEYHKKFKTIYHLREELA | 144 |
| WP_049516684 | 75 | RRRNRLRYLQEIFAEEMMQVDESFFQRLDD-SELV--EEDKR---G SRYPIFGNIA-AEVKYHDDFPTIYHLRKHLV | 144 |
| GAD46167 | 74 | RRKNRLRYLQEIFTEEMNKVDENFFQRLDD-SFLV--EEDKQ---G SKYPIFATMQ-EEKDYHEKFPTIYHLRKELA | 143 |
| WP_018363470 | 75 | RRKNRLRYLQDIFTEEMAKVDDSFFQRLDE-SFLT--DNDKN---F DSHPIFGNKA-EEDAYHQKFPTIYHLRKHLA | 144 |
| WP_003043819 | 74 | RRKNRIRYLQEIFANEMAKLDDSFFQRLEE-SFLV--EEDKK---N ERHPIFGNLA-DEVAYHRNYPTIYHLRKKLA | 143 |
| WP_006269658 | 74 | RRKNRLRYLQEIFTGEMNKVDENFFORLDD-SFLV--DEDKR---G EHHPIFGNIA-AEVKYHDDFPTIYHLRRHLA | 143 |
| WP_048800889 | 74 | RRKNRLRYLQEIFIEEMNKVDENFFQRLDD-SFLV--TEDKR---G SKYPIFGTLK-EEKEYYKEFETIYHLRKRLA | 143 |
| WP_012767106 | 74 | RRKNRIRYLQEIFSSEMSKVDDSFFHRLEE-SFLV--EEDKK---H ERHPIFGNIV-DEVAYHEKYPTIYHLRKKLA | 143 |
| WP_014612333 | 74 | RRKNRIRYLQEIFSSEMSKVDDSFFHRLEE-SFLV--EEDKK---H ERHPIFGNIV-DEVAYHEKYPTIYHLRKKLA | 143 |
| WP_015017095 | 74 | RRKNRIRYLQEIFSSEMSKVDDSFFHRLEE-SFLV--EEDKK---H ERHPIFGNIV-DEVAYHEKYPTIYHLRKKLA | 143 |
| WP_015057649 | 74 | RRKNRIRYLQEIFSSEMSKVDDSFFHRLEE-SFLV--EEDKK---H ERHPIFGNIV-DEVAYHEKYPTIYHLRKKLA | 143 |
| WP_048327215 | 74 | RRKNRIRYLQEIFSSEMSKVDDSFFHRLEE-SFLV--EEDKK---H ERHPIFGNIV-DEVAYHEKYPTIYHLRKKLA | 143 |
| WP_049519324 | 74 | RRKNRIRYLQEIFSSEMSKVDDSFFHRLEE-SFLV--EEDKK---H ERHPIFGNIV-DEVAYHEKYPTIYHLRKKLA | 143 |
| WP_012515931 | 74 | RRKNRLRYLKEIFTEEMAKVDDGFFQRLED-SFYV--LEDKE---G NKHPIFANLA-DEVAYHEKYPTIYHLRKKLV | 143 |
| WP_021320964 | 74 | RRKNRLRYLKEIFTEEMAKVDDGFFQRLED-SFYV--LEDKE---G NKHPIFANLA-DEVAYHKKYPTIYHLRKELV | 143 |
| WP_037581760 | 74 | RRKNRLRFLKEIFTEEMAKVDDGFFQRLED-SFYV--LEDKE---G NKHPIFANLA-DEVAYHKKYPTIYHLRKELV | 143 |
| WP_004232481 | 74 | RRKNRLRYLQEIFAKEMAKVDESFFQRLEE-SFLT--DDDKT---F DSHPIFGNKA-EEDTYHQEFPTIYHLRKHLA | 143 |
| WP_009854540 | 75 | RRKNRLRYLQEIFAEEMTKVDESFFYRLDE-SFLT--TDEKD---F ERHPIFGNKA-EEDAYHQKFPTIYHLRNYLA | 144 |
| WP_012962174 | 75 | RRKNRLRYLQEIFAEEMAKVDESFFYRLDE-SFLT--TDDKD---F ERHPIFGNKA-DEIKYHQEFPTIYHLRKHLA | 144 |
| WP_039695303 | 75 | RRKNRLRYLQEIFANEIAKVDESFFQRLDE-SFLT--DDDKT---F DSHPIFGNKA-EEDAYHQKFPTIYHLRKHLA | 144 |
| WP_014334983 | 74 | RRKNRLRYLQEIFAKEMTKVDESFFQRLEE-SFLT--DDDKT---F DSHPIFGNKA-EEDAYHQKFPTIYHLRKYLA | 143 |
| WP_003099269 | 74 | RRKYRIKELQKIFSSEMNELDIAFFPRLSE-SFLV--SDDKE---F ENHPIFGNLK-DEITYHNDYPTIYHLRQTLA | 143 |
| AHY15608 | 74 | RRKYRIKELQKIFSSEMNELDIAFFPRLSE-SFLV--SDDKE---F ENHPIFGNLK-DEITYHNDYPTIYHLRQTLA | 143 |
| AHY17476 | 74 | RRKYRIKELQKIFSSEMNELDIAFFPRLSE-SELV--SDDKE---F ENHPIFGNLK-DEITYHNDYPTIYHLRQTLA | 143 |
| ESR09100 | | ---------------------------------------------- ------------------------------- | |
| AGM98575 | 74 | RRKYRIKELQKIFSSEMNELDIAFFPRLSE-SFLV--SDDKE---F ENHPIFGNLK-DEITYHNDYPTIYHLRQTLA | 143 |
| ALF27331 | 74 | RRRNRILYLQEIFSEEMGKVDDSFFHRLED-SELV--TEDKR---G ERHPIFGNLE-EEVKYHENFPTIYHLRQYLA | 143 |
| WP_018372492 | 74 | RRRNRIRYLQHIFAEEMNRADENFFHRLKE-SFFV--EEDKT---Y SKYPIFGTLE-EEKNYHKNYPTIYHLRKTLA | 143 |
| WP_045618028 | 75 | RRKNRLRYLQEIFTEEMSKVDISFFHRLDD-SFLV--PEDKR---G SKYPIFATLE-EEKEYHKNGPTIYHLRKHLA | 144 |
| WP_045635197 | 74 | RRKNRLRYLQEIFSEEMSKVDSSFFHRLDD-SFLI--PEDKR---E SKYPIFATLT-EEKEYHKQFPTIYHLRKQLA | 143 |
| WP_002263549 | 74 | RRRNRILYLQEIFSEEMGKVDDSFFHRLED-SFLV--TEDKR---G ERHPIFGNLE-EEVKYHENFPTIYHLRQYLA | 143 |
| WP_002263887 | 74 | RRRNRILYLQEIFSEEMGKVDDSFFHRLED-SFLV--TEDKR---G ERHPIFGNLE-EEVKYHENFPTIYHLRQYLA | 143 |
| WP_002264920 | 74 | RRRNRILYLQEIFSEEMGKVDDSFFHRLDE-SFLT--DDDKN---F DSYPIFGNKA-EEDAYHQKFPTIYHLRKHLA | 143 |
| WP_002269043 | 74 | RRRNRILYLQEIFSEEMGKVDDSFFHRLED-SFLV--TEDKR---G ERHPIFGNLE-EEVKYHENFPTIYHLRQYLA | 143 |
| WP_002269448 | 74 | RRRNRILYLQEIFSEEMGKVDDSFFHRLED-SFLV--TEDKR---G ERHPIFGNLE-EEVKYHENFPTIYHLRQYLA | 143 |
| WP_002271977 | 74 | RRRNRILYLQEIFSEEMGKVDDSFFHRLED-SFLV--TEDKR---G ERHPIFGNLE-EEVKYHENFPTIYHLRQYLA | 143 |
| WP_002272766 | 74 | RRRNRILYLQEIFSEEMGKVDDSFFHRLED-SFLV--TEDKR---G ERHPIFGNLE-EEVKYHENFPTIYHLRQYLA | 143 |
| WP_002273241 | 74 | RRRNRILYLQEIFSEEMGKVDDSFFHRLED-SFLV--TEDKR---G ERHPIFGNLE-EEVKYHENFPTIYHLRQYLA | 143 |
| WP_002275430 | 74 | RRRNRILYLQEIFAEEMSKVDDSFFHRLED-SFLV--TEDKR---G ERHPIFGNLE-EEVKYHENFPTIYHLRQYLA | 143 |
| WP_002276448 | 74 | RRRNRILYLQEIFSEEMGKVDDSFFHRLED-SFLV--TEDKR---G ERHPIFGNLE-EEVKYHENFPTIYHLRQYLA | 143 |
| WP_002277050 | 74 | RRRNRILYLQEIFSEEMGKVDDSFFHRLDE-SFLT--DDDKN---F DSHPIFGNKA-EEDAYHQKFPTIYHLRKHLA | 143 |
| WP_002277364 | 74 | RRRNRILYLQEIFAEEMSKVDDSFFHRLED-SFLV--TEDKR---G ERHPIFGNLE-EEVKYHENFPTIYHLRQYLA | 143 |
| WP_002279025 | 74 | RRRNRILYLQEIFSEEMGKVDDSFFHRLED-FFLV--TEDKR---G ERHPIFGNLE-EEVKYHENFPTIYHLRQYLA | 143 |
| WP_002279859 | 74 | RRRNRILYLQEIFSEEMGKVDDSFFHRLDE-SFLT--DDDKN---F DSHPIFGNKA-EEDAYHQKFPTIYHLRKHLA | 143 |
| WP_002280230 | 74 | RRRNRILYLQEIFAEEMSKVDDSFFHRLED-SFLV--TEDKR---G ERHPIFGNLE-EEVKYHENFPTIYHLRQYLA | 143 |
| WP_002281696 | 74 | RRRNRILYLQEIFAEEMSKVDDSFFHRLED-SFLV--TEDKR---G ERHPIFGNLE-EEVKYHENFPTIYHLRQYLA | 143 |
| WP_002282247 | 74 | RRRNRILYLQEIFAEEMSKVDDSFFHRLDE-SFLT--DDDKN---F DSHPIFGNKA-EEDAYHQKFPTIYHLRKHLA | 143 |
| WP_002282906 | 74 | RRRNRILYLQEIFSEEMGKVDDSFFHRLED-SFLV--TEDKR---G ERHPIFGNLE-EEVKYHENFPTIYHLRQYLA | 143 |
| WP_002283846 | 74 | RRRNRILYLQEIFSEEMGKVDDSFFHRLED-SELV--TEDKR---G ERHPIFGNLE-EEVKYHENFPTIYHLRQYLA | 143 |
| WP_002287255 | 74 | RRRNRILYLQEIFAEEMSKVDDSFFHRLED-SELV--TEDKR---G ERHPIFGNLE-EEVKYHENFPTIYHLRQYLA | 143 |
| WP_002288990 | 74 | RRRNRILYLQEIFSEEMGKVDDSFFHRLED-SELV--TEDKR---G ERHPIFGNLE-EEVKYHENFPTIYHLRQYLA | 143 |
| WP_002289641 | 74 | RRRNRILYLQEIFSEEMGKVDDSFFHRLED-SELV--TEDKR---G ERHPIFGNLE-EEVKYHENFPTIYHLRQYLA | 143 |
| WP_002290427 | 74 | RRRNRILYLQEIFSEEMGKVDDSFFHRLED-SFLV--TEDKR---G ERHPIFGNLE-EEVKYHENFPTIYHLRQYLA | 143 |
| WP_002295753 | 74 | RRRNRILYLQEIFSEEMGKVNDSFFHRLED-SELV--TEDKR---G ERHPIFGNLE-EEVKYHENFPTIYHLRQYLA | 143 |
| WP_002296423 | 74 | RRRNRILYLQEIFSEEMGKVDDSFFHRLED-SFLV--TEDKR---G ERHPIFGNLE-EEVKYHENFPTIYHLRQYLA | 143 |
| WP_002304487 | 74 | RRRNRILYLQEIFAEEMMQVDESFFQRLDD-SFLV--EEDKR---G SRYPIFGTLK-EEKKYHKEFKTIYHLREKLA | 143 |
| WP_002305844 | 74 | RRRNRILYLQEIFSEEMDKVDDSFFHRLED-SFLV--TEDKR---G ERHPIFGNLE-EEVKYHENFPTIYHLRQYLA | 143 |
| WP_002307203 | 74 | RRRNRILYLQEIFSEEMGKVDDSFFHRLED-SFLV--TEDKR---G ERHPIFGNLE-EEVKYHENFPTIYHLRQYLA | 143 |
| WP_002310390 | 74 | RRRNRILYLQEIFSEEMGKVDDSFFHRLED-SFLV--TEDKR---G ERHPIFGNLE-EEVKYHENFPTIYHLRQYLA | 143 |
| WP_002352408 | 74 | RRRNRILYLQEIFSEEMGKVDDSFFHRLED-SFLV--TEDKR---G ERHPIFGNLE-EEVKYHENFPTIYHLRQYLA | 143 |
| WP_012997688 | 74 | RRRNRILYLQEIFAEEMSKVDDSFFHRLED-SFLV--TEDKR---G ERHPIFGNLE-EEVKYHENFPTIYHLRQYLA | 143 |
| WP_014677909 | 74 | RRRNRILYLQEIFSEEMGKVDDSFFHRLED-SELV--TEDKR---G ERHPIFGNLE-EEVKYHENFPTIYHLRQYLA | 143 |
| WP_019312892 | 74 | RRRNRILYLQEIFAEEMSKVDDSFFHRLED-SFLV--TEDKR---G ERHPIFGNLE-EEVKYHENFPTIYHLRQYLA | 143 |
| WP_019313659 | 74 | RRRNRILYLQEIFSEEMGKVDDSFFHRLED-SFLV--TEDKR---G ERHPIFGNLE-EEVKYHENFPTIYHLRQYLA | 143 |
| WP_019314093 | 74 | RRRNRILYLQEIFSEEMGKVDDSFFHRLED-SFLV--TEDKR---G ERHPIFGNLE-EEVKYHENFPTIYHLRQYLA | 143 |
| WP_019315370 | 74 | RRRNRILYLQEIFSEEMGKVDDSFFHRLED-SELV--TEDKR---G ERHPIFGNLE-EEVKYHENFPTIYHLRQYLA | 143 |
| WP_019803776 | 74 | RRRNRILYLQEIFSEEMGKVDDSFFHRLED-SELV--TEDKR---G ERHPIFGNLE-EEVKYHENFPTIYHLRQYLA | 143 |
| WP_019805234 | 74 | RRRNRILYLQEIFSEEMGKVDDSFFHRLED-SFLV--TEDKR---G ERHPIFGNLE-EEVKYHENFPTIYHLRQYLA | 143 |
| WP_024783594 | 74 | RRRNRILYLQEIFSEEMGKVDDSFFHRLED-SFLV--TEDKR---G ERHPIFGNLE-EEVKYHENFPTIYHLRQYLA | 143 |
| WP_024784288 | 74 | RRRNRILYLQEIFAEEMSKVDDSFFHRLDE-SFLT--DDDKN---F DSHPIFGNKA-EEDAYHQKFPTIYHLRKHLA | 143 |
| WP_024784666 | 74 | RRRNRILYLQEIFAEEMSKVDDSFFHRLED-SFLV--TEDKR---G ERHPIFGNLE-EEVKYHENFPTIYHLRQYLA | 143 |
| WP_024784894 | 74 | RRRNRILYLQEIFSEEMGKVDDSFFHRLED-SFLV--TEDKR---G ERHPIFGNLE-EEVKYHENFPTIYHLRQYLA | 143 |
| WP_024786433 | 74 | RRRNRILYLQEIFAEEMNKVDDSFFHRLDE-SFLT--DDDKN---F DSHPIFGNKA-EEDAYHQKFPTIYHLRKHLA | 143 |
| WP_049473442 | 74 | RRRNRILYLQEIFAEEMSKVDDSFFHRLED-SFLV--TEDKR---G ERHPIFGNLE-EEVKYYENFPTIYHLRQYLA | 143 |
| WP_049474547 | 74 | RRRNRILYLQEIFSEEMGKVDDSFFHRLED-SFLV--TEDKR---G ERHPIFGNLE-EEVKYHENFPTIYHLRQYLA | 143 |
| EMC03581 | 67 | RRRNRILYLQEIFAEEMSKVDDSFFHRLED-SFLV--TEDKR---G ERHPIFGNLE-EEVKYHENFPTIYHLRQYLA | 136 |
| WP_000428612 | 75 | RRKNRLRYLQEIFAEEMSKVDSSFFHRLDD-SFLI--PEDKK---G SKYPIFATLI-EEKEYHKQFPTIYHLRKQLA | 144 |
| WP_000428613 | 75 | RRKNRLRYLQEIFAEEMSKVDSSFFHRLDD-SFLI--PEDKR---G SKYPIFATLI-EEKEYHKQFPTIYHLRKQLA | 144 |
| WP_049523028 | 74 | RRRNRILYLQEIFAAEMNKVDESFFHRLDD-SFLV--PEDKR---G SKYPIFGTLR-EEKEYHKQFPTIYYLRKILA | 143 |
| WP_003107102 | 43 | RRINRIKYLOSIFDDEMSKIDSAFFQRIKD-SFLV--PDDKN---D DRHPIFGNIK-DEVDYHKNYPTIYHLRKKLA | 112 |
| WP_054279288 | 76 | RRKNRLCYLRDIFESEMHTIDKHFFLRLED-SFLH--KSDKR---Y EAHPIFGTLQ-EEKAYHDNYPTIYHLRKALA | 145 |
| WP_049531101 | 75 | RRKNRLRYLQEIFSEEISKVDNSFFHRLDD-SFLV--PEDKR---G SKYPIFATLT-EEKEYYKQFPTIYHLRKQLA | 144 |
| WP_049538452 | 75 | RRKNRLRYLQEIFAEEMNKVDSSFFHRLDD-SFLV--PEDKR---G SKYPIFATLA-EEKEYHKQFPTIYHLRKQLA | 144 |
| WP_049549711 | 75 | RRKNRLRYLQEIFSGEMSKVDSSFFHRLDD-SFLV--PEDKR---G SKYPIFATLV-EEKEYHKQFPTIYHLRKQLA | 144 |
| WP_007896501 | 76 | RRRYRLCQLQNIFATEMVKVDDTFFQRLSE-SFFY--YQDKA---F DKHPIFGNSK-EERAYHKTYPTIYHLRKDLA | 145 |
| EFR44625 | 28 | RRRYRLCQLQNIFATEMVKVDDTFFQRLSE-SFFY--YQDKA---F DKHPIFGNSK-EERAYHKTYPTIYHLRKDLA | 97 |
| WP_002897477 | 74 | RRRNRILYLQEIFTESMNEIDESFFHRLDD-SFLV--PEDKR---G SKYPIFATLQ-EEKEYHKQFPTIYHLRKQLA | 143 |
| WP_002906454 | 74 | RRKNRLRYLQEIFSEEISKLDSSFFHRLDD-SFLV--PEDKR---G SKYIFATLE-EEKEYHKKFPTIYHLRKHLA | 143 |
| WP_009729476 | 75 | RRKNRLRYLQEIFSEEIGKVDSSFFHRLDD-SFLI--PEDKR---G SKYPIFATLA-EEKKYHKQFPTIYHLRKQLA | 144 |
| CQR24647 | 74 | RRRNRILYLQDIFSPELNQVDESFLHRLDD-SFLVa--EDKR---G ERHVIFGNIA-DEVKYHKEFPTIYHLRKHLA | 143 |
| WP_000066813 | 75 | RRKNRLRYLQEIFSQEISKVDSSFFHRLDD-FFLV--PEDKR---G SKYPIFATLV-EEKEYHKKFPTIYHLRKHLA | 144 |
| WP_009754323 | 75 | RRKNRLRYLQEIFAEEMSKVDSSFFHRLDD-SFLV--PEDKS---G SKYPIFATLA-EEKEYHKKFPTIYHLRKHLA | 144 |
| WP_044674937 | 74 | RRRNRILYLQEIFAEEINKIDDSFFQRLDD-SFLIv--EDKQ---G SKHPIFGTLQ-EEKKYHKQFPTIYHLRKQLA | 143 |
| WP_044676715 | 74 | RRRNRILYLQEIFAEEINKIDDSFFQRLDD-SFLIv--EDKQ---G SKHPIFGTLQ-EEKEYHKQFPTIYHLRKQLA | 143 |
| WP_044680361 | 74 | RRRNRILYLQEIFAEEINKIDDSFFQRLDD-SFLIv--EDKQ---G SKHPIFGTLQ-EEKEYHKQFPTIYHLRKQLA | 143 |
| WP_044681799 | 74 | RRRNRILYLQEIFAEEINKIDDSFFQRLDD-SFLIv--EDKQ---G SKHPIFGTLQ-EEKEYHKQFPTIYHLRKQLA | 143 |
| WP_049533112 | 74 | RRRNRLRYLQEIFAEEMNKVDENFFQRLDD-SFLV--DEDKR---G ERHPIFGNIA-AEVKYHDDFPTIYHLRKHLA | 143 |
| WP_029090905 | 28 | HRKFRLRLLEDMFEKEILSKDPSFFIRLKE-AFLSpkDEQKQ---F ----LFNDKDyTDADYYEQYKTIYHLRYDLI | 100 |
| WP_006506696 | 61 | KRRERIRLLRAILQDMVLEKDPTFFIRLEHtSFLD--EEDKAky1G DNYNLFIDEDfNDYTYYHKYPTIYHLRKALC | 139 |
| AIT42264 | 74 | RRKNRICYLQEIFSNEMAKVDDSFFHRLEE-SFLV--EEDKK---H ERHPIFGNIV-DEVAYHEKYPTIYHLRKKLV | 143 |
| WP_034440723 | 73 | RRRFRIRELQKIFDKSMGEVDSNFFHRLDE-SFLV--EEDKE---Y SKYPIFSNEK-EDKNYYDKYPTIYHLRKDLA | 142 |
| AKQ21048 | 74 | RRKNRICYLQEIFSNEMAKVDDSFFHRLEE-SFLV--EEDKK---H ERHPIFGNIV-DEVAYHEKYPTIYHLRKKLV | 143 |
| WP_004636532 | 74 | RRRNRLIYLQDIFQQPMLAIDENFFHRLDD-SFFV--PDDKS---Y DRHPIFGSLE-EEVAYHNTYPTIYHLRKHLA | 143 |
| WP_002364836 | 74 | RRRNRLRYLQAFFEEAMTDLDENFFARLQE-SFLV--PEDKK---W HRHPIFAKLE-DEVAYHETYPTIYHLRKKLA | 143 |
| WP_016631044 | 25 | RRRNRLRYLQAFFEEAMTDLDENFFARLQE-SFLV--PEDKK---W HRHPIFAKLE-DEVAYHETYPTIYHLRKKLA | 94 |
| EMS75795 | | ---------------------------------------------- ------------------------------- | |
| WP_002373311 | 74 | RRRNRLRYLQAFFEEAMTDLDENFFARLQE-SFLV--PEDKK---W HRHPIFAKLE-DEVAYHETYPTIYHLRKKLA | 143 |
| WP_002378009 | 74 | RRRNRLRYLQAFFEEAMTALDENFFARLQE-SFLV--PEDKK---W HRHPIFAKLE-DEVAYHETYPTIYHLRKKLA | 143 |
| WP_002407324 | 74 | RRRNRLRYLQAFFEEAMTALDENFFARLQE-SFLV--PEDKK---W HRHPIFAKLE-DEVAYHETYPTIYHLRKKLA | 143 |
| WP_002413717 | 74 | RRRNRLRYLQAFFEEAMTDLDENFFARLQE-SFLV--PEDKK---W HRHPIFAKLE-DEVAYHETYPTIYHLRKKLA | 143 |
| WP_010775580 | 74 | RRRNRLRYLQAFFEEAMTALDENFFARLQE-SFLV--PEDKK---W HRHPIFAKLE-DEVAYHETYPTIYHLRKKLA | 143 |
| WP_010818269 | 74 | RRRNRLRYLQAFFEEAMTALDENFFARLQE-SFLV--PEDKK---W HRHPIFAKLE-DEVAYHETYPTIYHLRKKLA | 143 |
| WP_010824395 | 74 | RRRNRLRYLQAFFEEAMTDLDENFFARLQE-SFLV--PEDKK---W HRHPIFAKLE-DEVAYHETYPTIYHLRKKLA | 143 |
| WP_016622645 | 74 | RRRNRLRYLQAFFEEAMTALDENFFARLQE-SFLV--PEDKK---W HRHPIFAKLE-DEVAYHETYPTIYHLRKKLA | 143 |
| WP_033624816 | 74 | RRRNRLRYLQAFFEEAMTALDENFFARLQE-SFLV--PEDKK---W HRHPIFAKLE-DEVAYHETYPTIYHLRKKLA | 143 |
| WP_033625576 | 74 | RRRNRLRYLQAFFEEAMTALDENFFARLQE-SFLV--PEDKK---W HRHPIFAKLE-DEVAYHETYPTIYHLRKKLA | 143 |
| WP_033789179 | 74 | RRRNRLRYLQAFFEEAMTALDENFFARLQE-SFLV--PEDKK---W HRHPIFAKLE-DEVAYHETYPTIYHLRKKLA | 143 |
| WP_002310644 | 74 | RRRQRILELQKIFAPEILKIDEHFFARLNE-SFLV--LDEKK---Q SRHPVFATIK-QWKSYHQTYPTIYHLRQALA | 143 |
| WP_002312694 | 74 | RRRQRILELOKIFAPEILKIDEHFFARLNE-SELV--PDEKK---Q SRHPVFATIK-QWKSYHQTYPTIYHLRQALA | 143 |
| WP_002314015 | 74 | RRRQRILELQKIFAPEILKIDEHFFARLNE-SELV--LDEKK---Q SRHPVFATIK-QWKSYHQTYPTIYHLRQALA | 143 |
| WP_002320716 | 74 | RRRQRILELQKIFAPEILKIDEHFFARLNE-SFLV--LDEKK---Q SRHPVFATIK-QWKSYHQTYPTIYHLRQALA | 143 |
| WP_002330729 | 74 | RRRQRILELQKIFAPEILKIDEHFFARLNE-SELV--LDEKK---Q SRHPVFATIK-QWKSYHQTYPTIYHLRQALA | 143 |
| WP_002335161 | 74 | RRRQRILELQKIFAPEILKIDEHFFARLNE-SFLV--LDEKK---Q SRHPVFATIK-QWKSYHQTYPTIYHLRQALA | 143 |
| WP_002345439 | 74 | RRRQRILELQKIFAPEILKIDEHFFARLNE-SFLV--LDEKK---Q SRHPVFATIK-QWKSYHQTYPTIYHLRQALA | 143 |
| WP_034867970 | 74 | RRKYRLSKLQDLFAEELCKQDDCFFVRLEE-SFLV--PEEKQ---Y KPASIFPTLE-EEKEYYQKYPTIYHLRQKLV | 143 |
| WP_047937432 | 74 | RRRQRILELQKIFAPEILKIDEHFFARLNE-SFLV--LDEKK---Q SRHPVFATIK-QWKSYHQTYPTIYHLRQALA | 143 |
| WP_010720994 | 74 | RRKYRLSKLQDLFAEELCKQDDCFFVRLEE-SFLV--PEEKQ---Y KPASIFPTLE-EEKEYYQKYPTIYHLRQKLV | 143 |
| WP_010737004 | 74 | RRKYRLSKLQDLFAEELCKQDDCFFVRLEE-SFLV--PEEKQ---Y KPASIFPTLE-EEKEYYQKYPTIYHLRQKLV | 143 |
| WP_034700478 | 74 | RRKYRLSKLQDLFAEELCKQDDCFFVRLEE-SFLV--PEEKQ---Y KPASIFPTLE-EEKEYYQKYPTIYHLRQKLV | 143 |
| WP_007209003 | 74 | RRKNRICYLQEIFQPEMNHLDNNFFYRLNE-SFLVa--DDAK---Y DKHPIFGTLD-EEIHGHEQFPTIYHLRKYLA | 143 |
| WP_023519017 | 74 | RRRQRVLALQDIFAEEIHKKDPNFFARLEE-GDRV--EADKR---F AKFPVFATLS-EEKNYHRQYPTIYHLRHDLA | 143 |
| WP_010770040 | 74 | RRRNRICRLQDLFTEEMNQVDANFFHRLQE-SFLV--PDEKE---F ERHAIFGKME-EEVSYYREFPTIYHLRKHLA | 143 |
| WP_048604708 | 74 | RRRQRISYLQTFFQEEMNRIDPNFFNRLDE-SFLI--EEDKL---S ERHPIFGTIE-EEVAYHKNYATIYHLRKELA | 143 |
| WP_010750235 | 74 | RRKYRILELQKIFSEEILKKDSHFFARLDE-SFLI--PEDKQ---Y ARFPIFPTLL-EEKAYYQNYPTIYHLRQKLA | 143 |
| AII16583 | 113 | RRKNRICYLQEIFSNEMAKVDDSFFHRLEE-SFLV--EEDKK---H ERHPIFGNIV-DEVAYHEKYPTIYHLRKKLV | 182 |
| WP_029073316 | 66 | KRRERIRLLRGIMEDMVLDVDPTFFIRLANVSFLD--QEDKKdylK SNYNLFIDKDfNDKTYYDKYPTIYHLRKHLC | 144 |
| WP_031589969 | 66 | KRRERIRLLREIMEDMVLDVDPTFFIRLANVSFLD--QEDKKdylK DVYPIFGKRE-EELLYHDTHKTIYHLRSELA | 144 |
| KDA45870 | 75 | RRKNRLRYLQEIFAPALAKVDPNFFYRLEE-SSLVa--EDKK---Y DVYPIFGKRE-EELLYHDTHKTIYHLRSELA | 144 |
| WP_039099354 | 62 | RRKWRLGLLREIFEPYITPVDDTFFLRKKQ-SNLS--PKDQR---K -QTSLFNDRT--DRAFYDDYPTIYHLRYKLM | 132 |
| AKP02966 | 65 | RRKNRINWLNEIFSEELANTDPSFLIRLON-SWVSkkDPDRK---R DKYNLFIDNPyTDKEYYREFPTIFHLRKELI | 137 |
| WP_010991369 | 74 | RRRNRISYLQGIFAEEMSKTDANFFCRLSD-SFYV--DNEKR---N SRHPFFATIE-EEVEYHKNYPTIYHLREELV | 143 |
| WP_033838504 | 74 | RRRNRISYLQGIFAEEMSKTDANFFCRLSD-SFYV--DNEKR---N SRHPFFATIE-EEVEYHKNYPTIYHLREELV | 143 |
| EHN60060 | 77 | RRRNRISYLQGIFAEEMSKTDANFFCRLSD-SFYV--DNEKR---N SRHPFFATIE-EEVEYHKNYPTIYHLREELV | 146 |
| EFR89594 | | ---------------------------------------------- ------------------------------- | |
| WP_038409211 | 74 | RRRNRIAYLQEIFAAEMAEVDANFFYRLED-SFYI--ESEKR---H SRHPFFATIE-EEVAYHEEYKTIYHLREKLV | 143 |
| EFR95520 | | ---------------------------------------------- ------------------------------- | |
| WP_003723650 | 74 | RRRNRISYLQEIFAVEMANIDANFFCRLND-SFYV--DSEKR---N SRHPFFATIE-EEVAYHDNYRTIYHLREKLV | 143 |
| WP_003727705 | 74 | RRRNRISYLQEIFAVEMANIDANFFCRLND-SFYV--DSEKR---N SRHPFFATIE-EEVAYHKNYRTIYHLREELV | 143 |
| WP_003730785 | 74 | RRRNRISYLQEIFAVEMANIDANFFCRLND-SFYV--DSEKR---N SRHPFFATIE-EEVAYHKNYRTIYHLREELV | 143 |
| WP_003733029 | 74 | RRRNRISYLQEIFAIQMNEVDDNFFNRLKE-SFYA--ESDKK---Y NRHPFFGTVE-EEVAYYKDFPTIYHLRKELI | 143 |
| WP_003739838 | 74 | RRRNRISYLQEIFALEMANIDANFFCRLND-SFYV--DSEKR---N SRHPFFATIE-EEVAYHKNYRTIYHLREELV | 143 |
| WP_014601172 | 74 | RRRNRISYLQEIFAVEMANIDANFFCRLND-SFYV--DSEKR---N SRHPFFATIE-EEVAYHKNYRTIYHLREELV | 143 |
| WP_023548323 | 74 | RRRNRISYLQEIFAVEMANIDANFFCRLND-SFYV--DSEKR---N SRHPFFATIE-EEVAYHKNYRTIYHLREELV | 143 |
| WP_031665337 | 74 | RRRNRISYLQEIFAVEMANIDANFFCRLND-SFYV--DSEKR---N SRHPFFATIE-EEVAYHKNYRTIYHLREELV | 143 |
| WP_031669209 | 74 | RRRNRISYLQEIFAIQMNEVDDNFFNRLKE-SFYA--ESDKK---Y NRHPFFGTVE-EEVAYYKDFPTIYHLRKELI | 143 |
| WP_033920898 | 74 | RRRNRISYLQEIFAVEMANIDANFFCRLND-SFYV--DSEKR---N SRHPFFATIE-EEVAYHKNYRTIYHLREELV | 143 |
| AKI42028 | 77 | RRRNRISYLQEIFAVEMANIDANFFCRLND-SFYV--DSEKR---N SRHPFFATIE-EEVAYHKNYRTIYHLREELV | 146 |
| AKI50529 | 77 | RRRNRISYLQEIFAVEMANIDANFFCRLND-SFYV--DSEKR---N SRHPFFATIE-EEVAYHKNYRTIYHLREELV | 146 |
| EFR83390 | | ---------------------------------------------- ------------------------------- | |
| WP_046323366 | 74 | RRRNRISYLQEIFTAEMFEVDANFFYRLED-SFYI--ESEKR---Q SRHPFFATIE-EEVAYHENYRTIYHLREKLV | 143 |
| AKE81011 | 90 | RRKNRICYLQEIFSNEMAKVDDSFFHRLEE-SFLV--EEDKK---H ERHPIFGNIV-DEVAYHEKYPTIYHLRKKLV | 159 |
| CUO82355 | 65 | KRRERIRLLRAILQDMVLEKDPTFFIRLEHtSFLD--EEDKAky1G DNYNLFIDEDANDYTYYHKYPTIYHLRKALC | 143 |
| WP_033162887 | 66 | KRRERIRLLRDLLGDMVMEVDPTFFIRLLNVSFLD--EEDKQkn1G DNYNLFIEKDfNDKTYYDKYPTIYHLRKELC | 144 |
| AGZ01981 | 107 | RRKNRICYLQEIFSNEMAKVDDSFFHRLEE-SFLV--EEDKK---H ERHPIFGNIV-DEVAYHEKYPTIYHLRKKLV | 176 |
| AKA60242 | 74 | RRKNRICYLQEIFSNEMAKVDDSFFHRLEE-SFLV--EEDKK---H ERHPIFGNIV-DEVAYHEKYPTIYHLRKKLV | 143 |
| AKS40380 | 74 | RRKNRICYLQEIFSNEMAKVDDSFFHRLEE-SFLV--EEDKK---H ERHPIFGNIV-DEVAYHEKYPTIYHLRKKLV | 143 |
| 4UN5_B | 78 | RRKNRICYLQEIFSNEMAKVDDSFFHRLEE-SFLV--EEDKK---H ERHPIFGNIV-DEVAYHEKYPTIYHLRKKLV | 147 |
| WP_010922251 | 144 | [chemical structure] | 211 |
| WP_039695303 | 145 | DSSEKADLRLVYLALAHMIKFRGHFLIEGE-LNAENTDVQKI--FADFVGVYNRT--FDDS-H LSEITVDVA---SI | 212 |
| WP_045635197 | 144 | DSKEKTDLRLIYLALAHMIKYRGHFLYEEA-FDIKNNDIQKI--FNEFISIYDNT--FEGS-S LSGQNAQVE---AI | 211 |
| 5AXW_A | 105 | EEEFSA-------ALLHLAKRRG---VHNV------NEVE------------EDT----GN-- --------E----- | 134 |
| WP_009880683 | | --------------------------------------------------------------- -------------- | |
| WP_010922251 | 144 | DSTDKADLRLIYLALAHMIKFRGHFLIEGD-LNPDNSDVDKL--FIQLVQTYNQL--FEEN-- INASGVDAK---AI | 211 |
| WP_011054416 | 144 | DSTDKVDLRLIYLALAHMIKFRGHFLIEGD-LNPDNSDVDKL--FIQLVQTYNQL--FEEN-- INASRVDAK---AI | 211 |
| WP_011284745 | 144 | DSTDKADLRLIYLALAHMIKFRGHFLIEGD-LNPDNSDVDKL--FIQLVQTYNQL--FEEN-- INASGVDAK---AI | 211 |
| WP_011285506 | 144 | DSTDKADLRLIYLALAHMIKFRGHFLIEGD-LNPDNSDVDKL--FIQLVQTYNQL--FEEN-- INASGVDAK---AI | 211 |
| WP_011527619 | 144 | DSTDKADLRLIYLALAHMIKFRGHFLIEGD-LNPDNSDVDKL--FIQLVQTYNQL--FEEN-- INASGVDAK---AI | 211 |
| WP_012560673 | 144 | DSTDKADLRLIYLALAHMIKFRGHFLIEGD-LNPDNSDVDKL--FIQLVQTYNQL--FEEN-- INASRVDAK---AI | 211 |
| WP_014407541 | 144 | DSTDKADLRLIYLALAHMIKFRGHFLIEGD-LNPDNSDVDKL--FIQLVQIYNQL--FEEN-- INASRVDAK---AI | 211 |
| WP_020905136 | 144 | DSTDKADLRLIYLALAHMIKFRGHFLIEGD-LNPDNSDVDKL--FIQLVQTYNQL--FEEN-- INASGVDAK---AI | 211 |
| WP_023080005 | 144 | DSTDKVDLRLIYLALAHMIKFRGHFLIEGD-LNPDNSDVDKL--FIQLVQTYNQL--FEEN-- INASRVDAK---AI | 211 |
| WP_023610282 | 144 | DSTDKVDLRLIYLALAHMIKFRGHFLIEGD-LNPDNSDVDKL--FIQLVQTYNQL--FEEN-- INASRVDAK---AI | 211 |
| WP_030125963 | 144 | DSTDKADLRLIYLALAHMIKFRGHFLIEGD-LNPDNSDVDKL--FIQLVQTYNQL--FEEN-- INASGVDAK---AI | 211 |
| WP_030126706 | 144 | DSTDKVDLRLIYLALAHMIKFRGHFLIEGD-LNPDNSDVDKL--FIQLVQTYNQL--FEEN-- INASRVDAK---AI | 211 |
| WP_031488318 | 144 | DSTDKADLRLIYLALAHMIKFRGHFLIEGD-LNPDNSDVDKL--FIQLVQTYNQL--FEEN-- INASRVDAK---AI | 211 |
| WP_032460140 | 144 | DSTDKADLRLIYLALAHMIKFRGHFLIEGD-LNPDNSDVDKL--FIQLVQTYNQL--FEEN-- INASRVDAK---AI | 211 |
| WP_032461047 | 144 | DSTDKADLRLIYLALAHMIKFRGHFLIEGG-LNPDNSDVDKL--FIQLVQTYNQL--FEEN-- INASRVDAK---AI | 211 |
| WP_032462016 | 144 | DSTDKADLRLIYLALAHMIKFRGHFLIEGD-LNPDNSDVDKL--FIQLVQTYNQL--FEEN-- INANGVDAK---AI | 211 |
| WP_032462936 | 144 | DSTDKADLRLIYLALAHMIKFRGHFLIEGD-LNPDNSDVDKL--FIQLVQTYNQL--FEEN-- INASRVDAK---AI | 211 |
| WP_032464890 | 144 | DSTDKADLRLIYLALAHMIKFRGHFLIEGD-LNPDNSDVDKL--FIQLVQTYNQL--FEEN-- INASGVDAK---AI | 211 |
| WP_033888930 | 1 | ---------------------------------PDNSDVDKL--FIQLVQTYNQL--FEEN-- INASGVDAK---AI | 36 |
| WP_038431314 | 144 | DSTDKADLRLIYLALAHMIKFRGHFLIEGD-LNPDNSDVDKL--FIQLVQTYNQL--FEEN-- INASRVDAK---AI | 211 |
| WP_038432938 | 144 | DSTDKVDLRLIYLALAHMIKFRGHFLIEGD-LNPDNSDVDKL--FIQLVQTYNQL--FEEN-- INASRVDAK---AI | 211 |
| WP_038434062 | 144 | DSTDKADLRLIYLALAHMIKFRGHFLIEGD-LNPDNSDVDKL--FIQLVQTYNQL--FEEN-- INASRVDAK---AI | 211 |
| BAQ51233 | 55 | DSTDKADLRLIYLALAHMIKFRGHFLIEGD-LNPDNSDVDKL--FIQLVQTYNQL--FEEN-- INASGVDAK---AI | 122 |
| KGE60162 | | --------------------------------------------------------------- -------------- | |
| KGE60856 | | --------------------------------------------------------------- -------------- | |
| WP_002989955 | 144 | DSTDKADLRLIYLALAHMIKFRGHFLIEGD-LNPDNSDVDKL--FIQLVQTYNQL--FEEN-- INASGVDAK---AI | 211 |
| WP_003030002 | 144 | DISQKADLRLVYLALAHMIKFRGHFLIEGQ-LKAENTNVQAL--FKDFVEVYDKT--VEES-H LSEMTVDAL---SI | 211 |
| WP_003065552 | 147 | DSSEKADLRLVYLALAHMIKERGHFLIEGE-LNAENTDVQKI--FADFVGVYDRT--FDDS-H LSEITVDAA---SI | 214 |
| WP_001040076 | 144 | DKKEKADLRLVYLALAHIIKFRGHFLIEDDrFDVRNTDIQKQ--YQAFLEIFDTT--FENN-D LLSQDVDVE---AI | 212 |
| WP_001040078 | 144 | DKQEKADLRLIYLALAHIIKFRGHFLIEDDrFDVRNTDIQKQ--YQAFLEIFDTT--FENN-H LLSQNVDVE---AI | 212 |
| WP_001040080 | 144 | DKKEKADLRLIYIALAHIIKFRGHFLIEDDsFDVRNTDISKQ--YQDFLEIFNIT--FENN-D LLSQNVDVE---AI | 212 |
| WP_001040081 | 144 | DKKEKADLRLIYIALAHIIKFRGHFLIEDDsFDVRNTDISKQ--YQDFLEIFNTI--FENN-D LLSQNVDVE---AI | 212 |
| WP_001040083 | 144 | DKKEKADLRLIYIALAHIIKFRGHFLIEDDsFDVRNTDISKQ--YQDFLEIFNTT--FENN-D LLSQNVDVE---AI | 212 |
| WP_001040085 | 144 | DKKEKADLRLIYIALAHIIKFRGHFLIEDDsFDVRNTDISKQ--YQDFLEIFNTT--FENN-D LLSQNVDVE---AI | 212 |
| WP_001040087 | 144 | DKKEKADLRLIYIALAHIIKFRGHFLIEDDsFDVRNTDISKQ--YQDFLEIFNTT--FENN-D LLSQNVDVE---AI | 212 |
| WP_001040088 | 144 | DKKEKADLRLIYIALAHIIKFRGHFLIEDDsFDVRNTDISKQ--YQDFLEIFNTT--FENN-D LLSQNVDVE---AI | 212 |
| WP_001040089 | 144 | DKKEKADLRLIYIALAHIIKERGHFLIEDDsFDVRNTDISKQ--YQDFLEIFNTT--FENN-D LLSQNVDVE---AI | 212 |
| WP_001040090 | 144 | DKKEKADLRLIYIALAHIIKFRGHFLIEDDsFDVRNTDISKQ--YQDFLEIFNTT--FENN-D LLSQNVDVE---AI | 212 |
| WP_001040091 | 144 | DKKEKADLRLIYIALAHIIKFRGHFLIEDDsFDVRNTDISKQ--YQDFLEIFNTT--FENN-D LLSQNVDVE---AI | 212 |
| WP_001040092 | 144 | DKKEKADLRLVYLALAHIIKFRGHFLIEDDrFDVRNTDIQKQ--YQAFLEIFDTS--FENN-H LLSQNVDVE---AI | 212 |
| WP_001040094 | 144 | DKKEKADLRLIYLALAHIIKFRGHFLIEDDrFDVRNTDIQKQ--YQAFLEIFDTT--FENN-D LLSQNVDVE---AI | 212 |
| WP_001040095 | 144 | DKKEKADLRLIYLALAHIIKFRGHFLIEDDrFDVRNTDIQKQ--YQAFLEIFDTT--FENN-D LLSQNVDVE---AI | 212 |
| WP_001040096 | 144 | DKKEKADLRLIYLALAHIIKFRGHFLIEDDrFDVRNTDIQKQ--YQAFLEIFDTT--FENN-D LLSQNVDVE---AI | 212 |
| WP_001040097 | 144 | DKKEKADLRLIYLALAHIIKFRGHFLIEDDrFDVRNTDIQKQ--YQAFLEIFDTT--FENN-D LLSQNVDVE---AI | 212 |
| WP_001040098 | 144 | DKKEKADLRLIYLALAHIIKFRGHFLIEDDrFDVRNTDIQKQ--YQAFLEIFDTT--FENN-D LLSQNVDVE---AI | 212 |
| WP_001040099 | 144 | DKKEKADLRLIYLALAHIIKFRGHFLIEDDrFDVRNTDIQKQ--YQAFLEIFDTT--FENN-D LLSQNVDVE---AI | 212 |
| WP_001040100 | 144 | DKKEKADLRLIYLALAHIIKFRGHFLIEDDrFDVRNTDIQKQ--YQAFLEIFDTT--FENN-D LLSQNVDVE---AI | 212 |
| WP_001040104 | 144 | DKKEKADLRLIYIALAHIIKFRGHFLIEDDsFDVRNTDISKQ--YQDFLEIFNTT--FENN-D LLSQNVDVE---AI | 212 |
| WP_001040105 | 144 | DKKEKADLRLIYIALAHIIKFRGHFLIEDDsFDVRNTDISKQ--YQDFLEIFNTT--FENN-D LLSQNVDVE---AI | 212 |
| WP_001040106 | 144 | DKKEKANLRLVYLALAHIIKFRGHFLIEDDsFDVRNTDIQRQ--YQAFLEIFDTT--FENN-H LLSQNIDVE---GI | 212 |
| WP_001040107 | 144 | DKKEKADLRLVYLALAHIIKFRGHFLIEDDsFDVRNTDIQRQ--YQAFLEIFDIT--FENN-H LLSQNIDVE---GI | 212 |
| WP_001040108 | 144 | DKKEKADLRLVYLALAHIIKFRGHFLIEDDsFDVRNTDIQRQ--YQAFLEIFDTT--FENN-H LLSQNIDVE---GI | 212 |
| WP_001040109 | 144 | DKKEKANLRLVYLALAHIIKFRGHFLIEDDsFDVRNTDIQRQ--YQAFLEIFDTT--FENN-H LLSQNIDVE---GI | 212 |
| WP_001040110 | 144 | DKKEKANLRLVYLALAHIIKFRGHFLIEDDsFDVRNTDIQRQ--YQAFLEIFDIT--FENN-H LLSQNIDVE---GI | 212 |
| WP_015058523 | 144 | DKKEKADLRLVYLALAHIIKFRGHFLIEDDrFDVRNTDIQKQ--YQAFLEIFDTS--FENN-H LLSQNVDVE---AI | 212 |
| WP_017643650 | 144 | DKKEKADLRLIYLALAHIIKFRGHFLIEDDrFDVRNTDIQKQ--YQAFLEIFDTT--FENN-D LLSQNVDVE---AI | 212 |
| WP_017647151 | 144 | DKKEKADLRLFYLALAHIIKFRGHFLIEDDsFDVRNTDIQRQ--YQAFLEIFDTT--FENN-H LLSQNIDIE---GI | 212 |
| WP_017648376 | 144 | DKKEKADLRLFYLALAHIIKFRGHFLIEDDsFDVRNTDIQRQ--YQAFLEIFDTT--FENN-H LLSQNIDVE---GI | 212 |
| WP_017649527 | 144 | DKKEKADLRLIYIALAHIIKFRGHFLIEDDsFDVRNTDISKQ--YQDFLEIFNTT--FENN-D LLSQNVDVE---AI | 212 |
| WP_017771611 | 144 | DKKEKADLRLVYLALAHIIKFRGHFLIEDDsFDVRNTDIQRQ--YQAFLEIFDTT--FENN-H LLSQNIDVE---GI | 212 |
| WP_017771984 | 144 | DKKEKADLRLIYIALAHIIKFRGHFLIEDDsFDVRNTDISKQ--YQDFLEIFNTT--FENN-D LLSQNVDVE---AI | 212 |
| CFQ25032 | 144 | DKKEKADLRLIYIALAHIIKFRGHFLIEDDsFDVRNTDISKQ--YQDFLEIFNTT--FENN-D LLSQNVDVE---AI | 212 |
| CFV16040 | 144 | DKKEKADLRLIYIALAHIIKFRGHFLIEDDsFDVRNTDISKQ--YQDFLEIFNTT--FENN-D LLSQNVDVE---AI | 212 |
| KLJ37842 | 144 | DKKEKADLRLIYIALAHIIKFRGHFLIEDDsFDVRNTDISKQ--YQDFLEIFNTT--FENN-D LLSQNVDVE---AI | 212 |
| KLJ72361 | 144 | DKKEKADLRLIYIALAHIIKFRGHFLIEDDsFDVRNTDISKQ--YQDFLEIFNTT--FENN-D LLSQNVDVE---AI | 212 |
| KLL20707 | 144 | DKKEKADLRLIYIALAHIIKFRGHFLIEDDsFDVRNTDISKQ--YQDFLEIFNTT--FENN-D LLSQNVDVE---AI | 212 |
| KLL42645 | 144 | DKKEKANLRLVYLALAHIIKFRGHFLIEDDsFDVRNTDIQRQ--YQAFLEIFDTT--FENN-H LLSQNIDVE---GI | 212 |
| WP_047207273 | 144 | DKKEKADLRLIYIALAHIIKFRGHFLIEDDsFDVRNTDISKQ--YQDFLEIFNTT--FENN-D LLSQNVDVE---AI | 212 |
| WP_047209694 | 144 | DKKEKADLRLIYLALAHIIKFRGHFLIEDDsFDVRNTDIQKQ--YQAFLEIFDTT--FENN-D LLSQNVDVE---AI | 212 |
| WP_050198062 | 144 | DKKEKADLRLIYIALAHIIKFRGHFLIEDDsFDVRNTDISKQ--YQDFLEIFNTT--FENN-D LLSQNVDVE---AI | 212 |
| WP_050201642 | 144 | DKKEKADLRLIYIALAHIIKFRGHFLIEDDsFDVRNTDISKQ--YQDFLEIFNTT--FENN-D LLSQNVDVE---AI | 212 |
| WP_050204027 | 144 | DKKEKANLRLVYLALAHIIKFRGHFLIEDDsFDVRNTDIQRQ--YQAFLEIFDTT--FENN-H LLSQNIDVE---GI | 212 |
| WP_050881965 | 144 | DKKEKADLRLIYIALAHIIKFRGHFLIEDDsFDVRNTDISKQ--YQDFLEIFNTT--FENN-D LLSQNVDVE---AI | 212 |
| WP_050886065 | 144 | DKKEKADLRLIYIALAHIIKFRGHFLIEDDsFDVRNTDISKQ--YQDFLEIFNTT--FENN-D LLSQNVDVE---AI | 212 |
| AHN30376 | 144 | DKKEKADLRLVYLALAHIIKFRGHFLIEDDrFDVRNTDIQKQ--YQAFLEIFDTS--FENN-H LLSQNVDVE---AI | 212 |
| EAO78426 | 144 | DKKEKADLRLIYIALAHIIKFRGHFLIEDDsFDVRNTDISKQ--YQDFLEIFNTT--FENN-D LLSQNVDVE---AI | 212 |
| CCW42055 | 144 | DKKEKADLRLVYLALAHIIKFRGHFLIEDDrFDVRNTDIQKQ--YQAFLEIFDTT--FENN-H LLSQNVDVE---AI | 212 |
| WP_003041502 | 144 | DISQKADLRLVYLALAHMIKFRGHFLIEGQ-LKAENTNVQAL--FKDFVEVYDKT--VEES-H LSEITVDAL---SI | 211 |
| WP_037593752 | 145 | NSKEKADLRLVYLALAHMIKFRGHFLYEGD-LKAENTDVQAL--FKDFVEEYDKT--IEES-H LSEITVDAL---SI | 212 |
| WP_049516684 | 145 | DISQKADLRLVYLALAHMIKFRGHFLIEGQ-LKAENTNVQAL--FKDFVEVYDKT--VEES-H LSEMTVDAL---SI | 212 |
| GAD46167 | 144 | NSKEKADLRLVYLALAHMIKFRGHFLYEGD-LKAENTDVQAL--FKDFVEEYDKT--IEES-H LSEITVDAL---SI | 211 |
| WP_018363470 | 145 | DSTEKADLRLVYLALAHMIKFRGHFLIEGE-LNAENTDVQKL--FTDFVGVYDRT--FDDS-H LSEITVDAA---SI | 212 |
| WP_003043819 | 144 | DSPEKADLRLIYLALAHIIKFRGHFLIEGK-LNAENSDVAKL--FYQLIQTYNQL--FEES-- LDEIEVDAK---GI | 211 |
| WP_006269658 | 144 | DTSKKADLRLVYLALAHMIKFRGHFLYEGD-LKAENTDVQAL--FKDFVEEYDKT--IEES-H LSEITVDAL---SI | 211 |
| WP_048800889 | 144 | DSTGKVDLRLVYLALAHMIKFRGHFLIEGQ-LKAENTDVQTL--FNDFVEVYDKT--IEES-H LAEITVDAL---SI | 211 |
| WP_012767106 | 144 | DSTDKADLRLIYLALAHMIKFRGHFLIEGD-LNPDNSDMDKL--FIQLVQTYNQL--FEEN-- INASRVDAK---AI | 211 |
| WP_014612333 | 144 | DSTDKADLRLIYLALAHMIKFRGHFLIEGD-LNPDNSDVDKL--FIQLVQTYNQL--FEEK-- INASGVDAK---AI | 211 |
| WP_015017095 | 144 | DSTDKADLRLIYLALAHMIKFRGHFLIEGD-LNPDNSDMDKL--FIQLVQTYNQL--FEEN-- INASRVDAK---AI | 211 |
| WP_015057649 | 144 | DSTDKADLRLIYLALAHMIKFRGHFLIEGD-LNPDNSDMDKL--FIQLVQTYNQL--FEEN-- INASRVDAK---AI | 211 |
| WP_048327215 | 144 | DSTDKADLRLIYLALAHMIKFRGHFLIEGD-LNPDNSDMDKL--FIQLVQTYNQL--FEEN-- INASRVDAK---AI | 211 |
| WP_049519324 | 144 | DSTDKADLRLIYLALAHMIKFRGHFLIEGD-LNPDNSDVDKL--FIQLVQTYNQL--FEEN-- INASRVDAK---AI | 211 |
| WP_012515931 | 144 | DNPQKADLRLIYLAVAHIIKFRGHFLIEGT-LSSKNNNLQKS--FDHLVDTYNLL--FEEQ-- LLTEGINAK---EL | 211 |
| WP_021320964 | 144 | DNPQKADLRLIYLAVAHIIKFRGHFLIEGT-LSSKNNNLQKS--FDHLVDTYNLL--FEEQ-- LLTEGINAK---EL | 211 |
| WP_037581760 | 144 | DNPQKADLRLIYLAVAHIIKFRGHFLIEGT-LSSKNNNLQKS--FDHLVDTYNLL--FEEQ-- LLTEGINAK---EL | 211 |
| WP_004232481 | 144 | DSPEKVDLRLVYLALAHMIKFRGHFLIEGQ-LNAENTDVQKI--FADFVGVYDRT--FDDS-H LSEITVDAA---SI | 211 |
| WP_009854540 | 145 | DSSEKADLRLVYLALAHMIKYRGHFLIEGK-LNAENTDVOKL--FTDFVGVYDRT--FDDS-H LSEITVDVA---ST | 212 |
| WP_012962174 | 145 | DSHEKADLRLIYLALAHMIKFRGHFLIEGE-LNAENTDVQKL--FEAFVEVYDRT--FDDS-N LSEITVDAS---SI | 212 |
| WP_039695303 | 145 | DSSEKADLRLVYLALAHMIKFRGHFLIEGE-LNAENTDVOKI--FADFVGVYNRT--FDDS-H LSEITVDVA---SI | 212 |
| WP_014334983 | 144 | DSQEKADLRLVYLALAHMIKYRGHFLIEGE-LNAENTDVQKL--FNVFVETYDKI--VDES-H LSEIEVDAS---SI | 211 |
| WP_003099269 | 144 | DSDQKADLRLIYLALAHIIKFRGHFLIEGN-LDSENTDVHVL--FLNLVNIYNNL--FEED-- VETASIDAE---KI | 211 |
| AHY15608 | 144 | DSDQKADLRLIYLALAHIIKFRGHFLIEGN-LDSENTDVHVL--FLNLVNIYNNL--FEED-- VETASIDAE---KI | 211 |
| AHY17476 | 144 | DSDQKADLRLIYLALAHIIKFRGHFLIEGN-LDSENTDVHVL--FLNLVNIYNNL--FEED-- VETASIDAE---KI | 211 |
| ESR09100 | | --------------------------------------------------------------- -------------- | |
| AGM98575 | 144 | DSDQKADLRLIYLALAHIIKFRGHFLIEGN-LDSENTDVHVL--FLNLVNIYNNL--FEED-- VETASIDAE---KI | 211 |
| ALF27331 | 144 | DNPEKTDLRLVYLALAHIIKFRGHFLIEGK-FDTRNNDVORL--FQEFLAVYDNT--FENS-S LQEQNVQVE---EI | 211 |
| WP_018372492 | 144 | DTPDKMDIRLIYLALAHIIKYRGHFLIEGD-LDIENIGIQDS--FKSFIEEYNTQ--FGTK-- -LDSTTKVE---AI | 209 |
| WP_045618028 | 145 | DSKEKADFRLIYLALAHIIKYRGHFLYEES-FDIKNNDIQKI--FNEFISIYDNT--FEGS-S LNGQNAQVE---AI | 212 |
| WP_045635197 | 144 | DSKEKTDLRLIYLALAHMIKYRGHFLYEEA-FDIKNNDIQKI--FNEFISIYDNT--FEGS-S LSGQNAQVE---AI | 211 |
| WP_002263549 | 144 | DNPEKVDLRLVYLALAHIIKFRGHFLIEGK-FDTRNNDVQRL--FQEFLAVYDNT--FENS-S LQEQNVQVE---EI | 211 |
| WP_002263887 | 144 | DNPEKVDLRLVYLALAHIIKERGHFLIEGK-FDTRNNDVQRL--FQEFLAVYDNT--FENS-S LQEQNVQVE---EI | 211 |
| WP_002264920 | 144 | DSTEKADLRLVYLALAHMIKFRGHFLIEGE-LNAENTDVQKL--FADFVGVYDRT--FDDS-H LSEITVDAS---SI | 211 |
| WP_002269043 | 144 | DNPEKTDLRLVYLALAHIIKFRGHFLIEGK-FDTRNNDVORL--FQEFLAVYDNT--FENS-S LQEQNVQVE---EI | 211 |
| WP_002269448 | 144 | DNPEKVDLRLVYLALAHIIKFRGHFLIEGK-FDTRNNDVORL--FQEFLAVYDNT--FENS-S LQEQNVQVE---EI | 211 |
| WP_002271977 | 144 | DNPEKVDLRLVYLALAHIIKFRGHFLIEGK-FDTRNNDVORL--FQEFLAVYDNT--FENS-S LQEQNVQVE---EI | 211 |
| WP_002272766 | 144 | DNPEKVDLRLVYLALAHIIKFRGHFLIEGK-FDTRNNDVORL--FQEFLAVYDNT--FENS-S LQEQNVQVE---EI | 211 |
| WP_002273241 | 144 | DNPEKVDLRLVYLALAHIIKFRGHFLIEGK-FDTRNNDVORL--FQEFLAVYDNT--FENS-S LQEQNVQVE---EI | 211 |
| WP_002275430 | 144 | DNPEKVDLRLVYLALAHIIKFRGHFLIEGK-FDTRNNDVQRL--FQEFLAVYDNT--FENS-S LQEQNVQVE---EI | 211 |
| WP_002276448 | 144 | DNPEKVDLRLVYLALAHIIKFRGHFLIEGK-FDTRNNDVQRL--FQEFLAVYDNT--FENS-S LQEQNVQVE---EI | 211 |
| WP_002277050 | 144 | DSTEKADLRLVYLALAHMIKFRGHFLIEGE-LNAENTDVQKL--FADFVGVYDRT--FDDS-H LSEITVDAS---SI | 211 |
| WP_002277364 | 144 | DNPEKVDLRLVYLALAHIIKFRGHFLIEGK-FDTRNNDVQRL--FQEFLAVYDNT--FENS-S LQEQNVQVE---EI | 211 |
| WP_002279025 | 144 | DNPEKVDLRLVYLALAHIIKFRGHFLIEGK-FDTRNNDVORL--FQEFLAVYDNT--FENS-S LQEQNVQVE---EI | 211 |
| WP_002279859 | 144 | DSTEKADLRLVYLALAHMIKFRGHFLIEGE-LNAENTDVQKL--FADFVGVYDRT--FDDS-H LSEITVDAS---SI | 211 |
| WP_002280230 | 144 | DNPEKVDLRLVYLALAHIIKERGHFLIEGK-FDTRNNDVORL--FQEFLAVYDNT--FENS-S LQEQNVQVE---E1 | 211 |
| WP_002281696 | 144 | DNPEKVDLRLVYLALAHIIKFRGHFLIEGK-FDTRNNDVORL--FQEFLAVYDNT--FENS-S LQEQNVQVE---EI | 211 |
| WP_002282247 | 144 | DSTEKADLRLVYLALAHMIKFRGHFLIEGE-LNAENTDVQKL--FADFVGVYDRT--FDDS-H LSEITVDAS---SI | 211 |
| WP_002282906 | 144 | DNPEKVDLRLVYLALAHIIKFRGHFLIEGK-FDTRNNDVQRL--FQEFLAVYDNT--FENS-S LQEQNVQVE---EI | 211 |
| WP_002283846 | 144 | DNPEKTDLRLVYLALAHIIKFRGHFLIEGK-FDTRNNDVORL--FQEFLAVYDNT--FENS-S LQEQNVQVE---EI | 211 |
| WP_002287255 | 144 | DNPEKVDLRLVYLALAHIIKFRGHFLIEGK-FDTRNNDVORL--FQEFLAVYDNT--FENS-S LQEQNVQVE---EI | 211 |
| WP_002288990 | 144 | DNPEKTDLRLVYLALAHIIKFRGHFLIEGK-FDTRNNDVORL--FQEFLAVYDNT--FENS-S LQEQNVQVE---EI | 211 |
| WP_002289641 | 144 | DNPEKTDLRLVYLALAHIIKFRGHFLIEGK-FDTRNNDVORL--FQEFLAVYDNT--FENS-S LQEQNVQVE---EI | 211 |
| WP_002290427 | 144 | DNPEKTDLRLVYLALAHIIKFRGHFLIEGK-FDTRNNDVQRL--FQEFLAVYDNT--FENS-S LQEQNVQVE---EI | 211 |
| WP_002295753 | 144 | DNPEKVDLRLVYLALAHIIKFRGHFLIEGK-FDTRNNDVQRL--FQEFLAVYDNT--FENS-S LQEQNVQVE---EI | 211 |
| WP_002296423 | 144 | DNPEKTDLRLVYLALAHIIKFGGHFLIEGK-FDTRNNDVORL--FQEFLAVYDNT--FENS-S LQEQNVQVE---EI | 211 |
| WP_002304487 | 144 | NSTEKADLRLVYLSLAHMIKFRGHFLIEGQ-LKAENTNVQAL--FKDFVEVYDKT--VEES-H LSEMTVDAL---SI | 211 |
| WP_002305844 | 144 | DNPEKVDLRLVYLALAHIIKFRGHFLIEGK-FDTRNNDVORL--FQEFLAVYDNT--FENS-S LQEQNVQVE---EI | 211 |
| WP_002307203 | 144 | DNPEKVDLRLVYLALAHIIKFRGHFLIEGK-FDTRNNDVQKL--FQEFLAVYDNT--FENS-S LQEQNVQVE---EI | 211 |
| WP_002310390 | 144 | DNPEKTDLRLVYLALAHIIKFRGHFLIEGK-FDTRNNDVQRL--FQEFLAVYDNT--FENS-S LQEQNVQVE---EI | 211 |
| WP_002352408 | 144 | DNPEKTDLRLVYLALAHIIKFRGHFLIEGK-FDTRNNDVORL--FQEFLAVYDNT--FENS-S LQEQNVQVE---EI | 211 |
| WP_012997688 | 144 | DNPEKVDLRLVYLALAHIIKFRGHFLIEGK-FDTRNNDVORL--FQEFLAVYDNT--FENS-S LQEQNVQVE---EI | 211 |
| WP_014677909 | 144 | DNPEKTDLRLVYLALAHIIKFRGHFLIEGK-FDTRNNDVORL--FQEFLAVYDNT--FENS-S LQEQNVQVE---EI | 211 |
| WP_019312892 | 144 | DNPEKVDLRLVYLALAHIIKFRGHFLIEGK-FDTRNNDVORL--FQEFLAVYDNT--FENS-S LQEQNVQVE---EI | 211 |
| WP_019313659 | 144 | DNPEKVDLRLVYLALAHIIKFRGHFLIEGK-FDTRNNDVQRL--FQEFLAVYDNT--FENS-S LQEQNVQVE---EI | 211 |
| WP_019314093 | 144 | DNPEKVDLRLVYLALAHIIKFRGHFLIEGK-FDTRNNDVQKL--FQEFLAVYDNT--FENS-S LQEQNVQVE---EI | 211 |
| WP_019315370 | 144 | DNPEKTDLRLVYLALAHIIKFRGHFLIEGK-FDTRNNDVORL--FQEFLAVYDNT--FENS-S LQEQNVQVE---EI | 211 |
| WP_019803776 | 144 | DNPEKVDLRLVYLALAHIIKFRGHFLIEGK-FDTRNNDVORL--FQEFLAVYDNT--FENS-S LQEQNVQVE---EI | 211 |
| WP_019805234 | 144 | DNPEKTDLRLVYLALAHIIKFRGHFLIEGK-FDTRNNDVQRL--FQEFLAVYDNT--FENS-S LQEQNVQVE---EI | 211 |
| WP_024783594 | 144 | DNPEKVDLRLVYLALAHIIKERGHFLIEGK-FDTRNNDVORL--FQEFLAVYDNT--FENS-S LQEQNVQVE---EI | 211 |
| WP_024784288 | 144 | DSTEKADLRLVYLALAHMIKFRGHFLIEGE-LNAENTDVQKL--FADFVGVYDRT--FDDS-H LSEITVDAS---SI | 211 |
| WP_024784666 | 144 | DNPEKVDLRLVYLALAHIIKFRGHFLIEGK-FDTRNNDVQRL--FQEFLAVYDNT--FENS-S LQEQNVQVE---EI | 211 |
| WP_024784894 | 144 | DNPEKTDLRLVYLALAHIIKFRGHFLIEGK-FDTRNNDVQRL--FQEFLAVYDNT--FENS-S LQEQNVQVE---EI | 211 |
| WP_024786433 | 144 | DSTEKADLRLVYLALAHMIKFRGHFLIEGE-LNAENTDVQKL--FADFVGVYDRT--FDDS-H LSEITVDAS---SI | 211 |
| WP_049473442 | 144 | DNPEKVDLRLVYLALAHIIKFRGHFLIEGK-FDTRNNDVORL--FQEFLAVYDNT--FENS-S LQEQNVQVE---EI | 211 |
| WP_049474547 | 144 | DNPEKTDLRLVYLALAHIIKFRGHFLIEGK-FDTRNNDVQRL--FQEFLAVYDNT--FENS-S LQEQNVQVE---EI | 211 |
| EMC03581 | 137 | DNPEKVDLRLVYLALAHIIKFRGHFLIEGK-FDTRNNDVQRL--FQEFLAVYDNT--FENS-S LQEQNVQVE---EI | 204 |
| WP_000428612 | 145 | DSKEKTDLRLIYLALAHMIKYRGHFLYEDT-FDIKNNDIQKI--FNEFISIYNNT--FEGN-S LSGQNVQVE---AI | 212 |
| WP_000428613 | 145 | DSKEKTDLRLIYLALAHMIKYRGHFLYEDT-FDIKNNDIQKI--FSEFISIYDNT--FEGS-S LSGQNAQVE---AI | 212 |
| WP_049523028 | 144 | DSKEKVDLRLIYLALAHIIKYRGHFLYEDS-FDIKNNDIQKI--FNEFTILYDNT--FEES-S LSKGNAQVE---EI | 211 |
| WP_003107102 | 113 | DSDEKADLRLIYLALAHIIKFRGHFLIEGD-LDSQNTDVNAL--FLKLVDTYNLM--FEDD-- IDTQTIDAT---VI | 180 |
| WP_054279288 | 146 | DNTEKADLRLIYLALAHIIKFRGHFLIEGA-LSANNTDVQQL--VHALVDAYNIM--FEED-- LDIEAIDVK---AI | 213 |
| WP_049531101 | 145 | DSKEKADLRLIYLTLAHMIKYRGHFLYEES-FDIKNNDIQKI--FNEFISIYDNT--FEGS-S LSGQNAQVE---AI | 212 |
| WP_049538452 | 145 | DSKEKADLRLIYLALAHMIKYRGHFLYEEA-FDIKNNDIQKI--FNEFINIYDNT--FEGS-S LSGONEQVE---AI | 212 |
| WP_049549711 | 145 | DSKEKADLRLIYLVLAHMIKYRGHFLYEEA-FDIKNNDIQKI--FNEFISIYDNT--FEGS-S LSGQNAQVE---TI | 212 |
| WP_007896501 | 146 | DRDQKADLRLIYLALSHIIKFRGHFLIEGK-LNSENTDVQKL--FIALVTVYNLL--FEEE-- IAGETCDAK---AL | 213 |
| ERF44625 | 98 | DRDQKADLRLIYLALSHIIKFRGHFLIEGK-LNSENTDVQKL--FIALVTVYNLL--FEEE-- IAGETCDAK---AL | 165 |
| WP_002897477 | 144 | DSKEKSDVRLIYLALAHMIKYRGHFLYEET-FDIKNNDIQKI--FNEFINIYDNT--FEGS-S LSGQNAQVE---AI | 211 |
| WP_002906454 | 144 | DSKEKTDLRLIYLALAHMIKYRGHFLYEES-FDIKNNDIQKI--FNEFISIYDNT--FEGS-S LSGQNAQVE---AI | 211 |
| WP_009729476 | 145 | DSKEKTDLRLIYLALAHMIKYRGHFLYEEA-FDIKNNDIQKI--FNEFISIYNNT--FEGN-S LSGQNVQVE---AI | 212 |
| CQR24647 | 144 | DSSEKADLRLVYLALAHIIKYRGHFLIDEP-IDIRNMNSQNL--FKEFLLAFDGI--QVDC-Y LASKHTDIS---GI | 211 |
| WP_000066813 | 145 | DSKEKTDLRLIYLALAHMIKYRGHFLYEES-FDIKNNDIQKI--FSEFISIYDNT--FEGK-S LSGQNAQVE---AI | 212 |
| WP_009754323 | 145 | DSKEKADLRLIYLALAHITKYRGHFLYEEA-FDIKNNDIQKI--FNEFINIYDNT--FEGS-S LSGONAQVE---AI | 212 |
| WP_044674937 | 144 | DSSQKADIRLIYLALAHIIKYRGHFLFEGD-LKSENKDVQHL--FNDFVEMFDKY--VEGS-Y LSENLPNVA---DV | 211 |
| WP_044676715 | 144 | DSSQKADIRLIYLALAHIIKYRGHFLFEGD-LKSENKDVQHL--FNDFVEMFDKT--VEGS-Y LSENLPNVA---DV | 211 |
| WP_44680361 | 144 | DSSQKADIRLIYLALAHIIKYRGHFLFEGD-LKSENKDVQHL--FNDFVEMFDKT--VEGS-Y LSENLPNVA---DV | 211 |
| WP_044681799 | 144 | DSSQKADIRLIYLALAHIIKYRGHFLFEGD-LKSENKDVQHL--FNDFVEMFDKT--VEGS-Y LSENLPNVA---DV | 211 |
| WP_049533112 | 144 | DISQKADLRLVYLALAHMIKFRGHFLIEGQ-LKAENTNVQAL--FKDFVEVYDKT--VEES-H LSEMTVDAL---SI | 211 |
| WP_029090905 | 101 | SQHRQFDIREVYLAIHHLIKYRGHFIYEDQtFTTDGNQLQHH--IKAIITMINSTl---NR-- IIPETIDINvfeKI | 171 |
| WP_006506696 | 140 | ESTEKADPRLIYLALHHIVKYRGNFLYEGQkFNMDASNIEDK--LSDIFTQFTSFnnIPYEdD --KKNLEIL---EI | 210 |
| AIT42264 | 144 | DSTDKADLRLIYLALAHMIKFRGHFLIEGD-LNPDNSDVDKL--FIQLVQTYNQL--FEEN-- INASGVDAK---AI | 211 |
| WP_034440723 | 143 | DSNQKADLRLIYLALAHMIKYRGHFLIEGD-LKMDFISISES--FQEFIDSYNEVcaLEDE-N NDELLTQIE---NI | 217 |
| AKQ21048 | 144 | DSTDKADLRLIYLALAHMIKFRGHLFIEGD-LNPDNSDVDKL--FIQLVQTYNQL--FEEN-- INASGVDAK---AI | 211 |
| WP_004636532 | 144 | DNPEKADLRLVYTALAHIVKYRGHFLIEGE-LNTENTSISET--FEQFLDTYDSI--FKEQ-- LVGDISKVE---EI | 210 |
| WP_002364836 | 144 | DSSEQADLRLIYLALAHIVKYRGHFLIEGK-LSTENISVKEQ--FQQFMIIYNQT--FVNGeS PLPESVLIE---EE | 217 |
| WP_016631044 | 95 | DSSEQADLRLIYLALAHIVKYRGHFLIEGK-LSTENTSVKDQ--FQQFMVIYNQT--FVNGeS PLPESVLIE---EE | 168 |
| EMS75795 | | --------------------------------------------------------------- -------------- | |
| WP_002737311 | 144 | DSSEQADLRLIYLALAHIVKYRGHFLIEGK-LSTENTSVKDQ--FQQFMVIYNQT--FVNGeS PLPESVLIE---EE | 217 |
| WP_002378009 | 144 | DSSEQADLRLIYLALAHIVKYRGHFLIEGK-LSTENISVKEQ--FQQFMIIYNQT--FVNGeS PLPESVLIE---EE | 217 |
| WP_002407324 | 144 | DSSEQADLRLIYLALAHIVKYRGHFLIEGK-LSTENISVKEQ--FQQFMIIYNQT--FVNGeS PLPESVLIE---EE | 217 |
| WP_002413717 | 144 | DSSEQADLRLIYLALAHIVKYRGHFLIEGK-LSTENISVKEQ--FQQFMIIYNQT--FVNGeS PLPESVLIE---EE | 217 |
| WP_010775580 | 144 | DSSEQADLRLIYLALAHIVKYRGHFLIEGK-LSTENISVKEQ--FQQFMIIYNQT--FVNGeS PLPESVLIE---EE | 217 |
| WP_010818269 | 144 | DSSEQADLRLIYLALAHIVKYRGHFLIEGK-LSTENISVKEQ--FQQFMIIYNQT--FVNGeS PLPESVLIE---EE | 217 |
| WP_010824395 | 144 | DSSEQADLRLIYLALAHIVKYRGHFLIEGK-LSTENTSVKDQ--FQQFMVIYNQT--FVNGeS PLPESVLIE---EE | 217 |
| WP_016622645 | 144 | DSSEQADLRLIYLALAHIVKYRGHFLIEGK-LSTENISVKEK--FQOFMIIYNQT--FVNGeG PLPESVLIE---EE | 217 |
| WP_033624816 | 144 | DSSEQADLRLIYLALAHIVKYRGHFLIEGK-LSTENISVKDQ--FQQFMVIYNQT--FVNGeS PLPESVLIE---EE | 217 |
| WP_033625576 | 144 | DSSEQADLRLIYLALAHIVKYRGHFLIEGK-LSTENISVKEQ--FQOFMIIYNQT--FVNGeS PLPESVLIE---EE | 217 |
| WP_033789179 | 144 | DSSEQADLRLIYLALAHIVKYRGHFLIEGK-LSTENISVKEQ--FQQFMIIYNQT--FVNGeS PLPESVLIE---EE | 217 |
| WP_002310644 | 144 | DSSEKADIRLVYLAMAHLLKYRGHFLIEGE-LNTENSSVTET--FRQFLSTYNQQ--FSEA-D KLDEAVDCS---FV | 216 |
| WP_002312694 | 144 | DSSEKADIRLVYLAMAHLLKYRGHFLIEGE-LNTENSSVTET--FRQFLSTYNQQ--FSEA-G KLDEAVDCS---FV | 216 |
| WP_002314015 | 144 | DSSEKADIRLVYLAMAHLLKYRGHFLIEGE-LNTENSSVTET--FRQFLSTYNQQ--FSEA-D KLDEAVDCS---FV | 216 |
| WP_002320716 | 144 | DSSEKADIRLVYLAMAHLLKYRGHFLIEGE-LNTENSSVTET--FROFLSTYNQQ--FSEA-D KLDEAVDCS---FV | 216 |
| WP_002330729 | 144 | DSSEKADIRLVYLAMAHLLKYRGHFLIEGE-LNTENSSVTET--FRQFLSTYNQQ--FSEA-D KLDEAVDCS---FV | 216 |
| WP_002335161 | 144 | DSSEKADIRLVYLAMAHLLKYRGHFLIEGE-LNTENSSVTET--FRQFLSTYNQQ--FSEA-D KLDEAVDCS---FV | 216 |
| WP_002345439 | 144 | DSSEKADIRLVYLAMAHLLKYRGHFLIEGE-LNTENSSVTET--FRQFLSTYNQQ--FSEA-D KLDEAVDCS---FV | 216 |
| WP_034867970 | 144 | DSTEKEDLRLVYLALAHLLKYRGHELFEGD-LDTENTSIEES--FRVFLEQYSKQ--SDOP-- -LIVHQPVL---TI | 209 |
| WP_047937432 | 144 | DSSEKADIRLVYLAMAHLLKYRGHFLIEGE-LNTENSSVTET--FRQFLSTYNQQ--FSEA-D KLDEAVDCS---FV | 216 |
| WP_010720994 | 144 | DSTEKGDLRLVYLALAHLLKYRGHELFEGD-LDTENTSIEES--FRVFLEQYGKQ--SDQP-- -LIVHQPVL---TI | 209 |
| WP_010737004 | 144 | DSTEKEDLRLVYLALAHLLKYRGHFLFEGD-LDTENTSIEES--FRVFLEQYSKQ--SDQP-- -LIVHQPVL---TI | 209 |
| WP_034700478 | 144 | DSTEKEDLRLVYLALAHLLKYRGHELFEGD-LDTENTSIEES--FRVFLEQYGKQ--SDQP-- -LIVHQPVL---TI | 209 |
| WP_007209003 | 144 | DGDEKADLRLVYLAIAHIIKFRGNFLIEGE-LNTENNSVIELs--KVFVQLYNQT1-SELE-- FIDESIDES---EV | 214 |
| WP_023519017 | 144 | NSKEQADIRLVYLAIAHCLKYRGHFLFEGE-LDTENTSVTEN--YQQFLQAYQQF--FPEP-- -IGDLDDAV---PI | 209 |
| WP_010770040 | 144 | DTSEQADLRLVYLALAHIVKYRGHFLIEGE-LNTENSSVSET--FRTFIQVYNQI--FRENe- PLAVPDNIE---EL | 212 |
| WP_048604708 | 144 | DAEEKADLRLVYLALAHIIKYRGHFLIEGR-LSTENTSTEET--FKTFLQKYNQT--FN---- PVDETISIG---SI | 208 |
| WP_010750235 | 144 | DSTEKADIRLVYLALAHMIKYRGHFLFEGE-LDTENTSVEET--FKEFIDIYNEQ--FEEG-- -IIFYKDIP---LI | 209 |
| AII16583 | 183 | DSTDKADLRLIYLALAHMIKFRGHFLIEGD-LNPDNSDVDKL--FIQLVQTYNQL--FEEN-- INASGVDAK---AI | 250 |
| WP_029073316 | 145 | ESKEKEDPRLIYLALHHIVKYRGNFLYEGQKFSMDVSNIEDK--MIDVLRQFNEIn1FEYVeD --KKIDEVL---NV | 215 |
| WP_031589969 | 145 | ESKEKEDPRLIYLALHHIVKYRGNFLYEGQKFSMDVSNIEDK--MIDVLRQFNEIn1FEYVeD --KKIDEVL---NV | 215 |
| KDA45870 | 145 | NNDRPADLRLVYLALAHIIKYRGNFLLEGE-IDLRTTDINKV--FAEFSETLNEN--SDENIG ----KLDVA---DI | 209 |
| WP_039099354 | 133 | TEKRQFDIREIYLAMHHIVKYRGHFLNEAPvSSFKSSEINLVahFDRLNTIFADL--FSESgF -TDKLAEVK---AL | 206 |
| AKP02966 | 138 | INKNKADIRLVYLALHNILKYRGNFTYEHQkFNISTLNSNLS---KELIELNQQLikYDIS-- -FPDNCDWNhisDI | 208 |
| WP_010991369 | 144 | NSSEKADLRLVYLALAHIIKYRGNFLIEGA-LDTQNTSVDGI--YKQFIQTYNQV--FASGIE KLEDNKDVA---KI | 217 |
| WP_033838504 | 144 | NSSEKADLRLVYLALAHIIKYRGNFLIEGA-LDTQNTSVDGI--YKQFIQTYNQV--FASGIE KLEDNKDVA---KI | 217 |
| EHN60060 | 147 | NSSEKADLRLVYLALAHIIKYRGNFLIEGA-LDTQNTSVDGI--YKQFIQTYNQV--FASGIE KLEDNKDVA---KI | 220 |
| EFR89594 | | --------------------------------------------------------------- -------------- | |
| WP_038409211 | 144 | NSSDKADLRLVYLALAHIIKYRGNFLIEGM-LDTKNTSVDEV--FKQFIQTYNQI--FASDIE RLEENKEVA---EI | 217 |
| EFR95520 | | --------------------------------------------------------------- -------------- | |
| WP_003723650 | 144 | NSSEKADLRLVYLALAHIIKYRGNFLIEGA-LDTKNTSVDEV--YKQFIETYNQV--FMSNIE KVEENIEVA---NI | 217 |
| WP_003727705 | 144 | NSSEKADLRLVYLALAHIIKYRGNFLIEGA-LDTKNTSVDEV--YKQFIQTYNQV--FMSNIE KVEENTEVA---SI | 217 |
| WP_003730785 | 144 | NSSEKADLRLVYLALAHIIKYRGNFLIEGA-LDTKNTSVDEV--YKQFIQTYNQV--FMSNIE KVEENTEVA---SI | 217 |
| WP_003733029 | 144 | DSQKKADLRLVYLALAHIIKYRGHFLIEGA-LDTKNTSIDEM--FKQFLQIYNQV--FANDIE KTEKNQEVA---QI | 217 |
| WP_003739838 | 144 | NSSEKADLRLVYLALAHIIKYRGNFLIEGA-LDTKNTSVDGV--YKQFIQTYNQV--FISNIE KMEENTTVA---DI | 217 |
| WP_014601172 | 144 | NSSEKADLRLVYLALAHIIKYRGNFLIEGA-LDTKNTSVDGV--YEQFIQTYNQV--FMSNIE KVEENIEVA---NI | 217 |
| WP_023548323 | 144 | NSSEKADLRLVYLALAHIIKYRGNFLIEGA-LDTKNTSVDGV--YEQFILTYNQV--FMSNIE KVEENIEVA---NI | 217 |
| WP_031665337 | 144 | NSSEKADLRLVYLALAHIIKYRGNFLIEGA-LDTKNTSVDGV--YEQFIQTYNQV--FMSNIE KVEENIEVA---NI | 217 |
| WP_031669209 | 144 | DSQKKADLRLVYLALAHIIKYRGHFLIEGA-LDTKNTSIDEM--FKQFLQIYNQV--FANDIE KTEKNQEVA---QI | 217 |
| WP_033920898 | 144 | NSSEKADLRLVYLALAHIIKYRGNFLIEGA-LDTKNTSVDGV--YEQFIQTYNQV--FMSNIE KVEENIEVA---NI | 217 |
| AKI42028 | 147 | NSSEKADLRLVYLALAHIIKYRGNFLIEGA-LDTKNTSVDGV--YEQFIQTYNQV--FMSNIE KVEENIEVA---NI | 220 |
| AKI50529 | 147 | NSSEKADLRLVYLALAHIIKYRGNFLIEGA-LDTKNTSVDGV--YEQFIQTYNQV--FMSNIE KVEENIEVA---NI | 220 |
| EFR83390 | | --------------------------------------------------------------- -------------- | |
| WP_046323366 | 144 | NSSDKADLRLVYLALAHIIKYRGNFLIEGK-LDTKNTSVDEV--FKQFIKTYNQV--FASDIE RIEENNEVA---KI | 217 |
| AKE81011 | 160 | DSTDKADLRLIYLALAHMIKFRGHFLIEGD-LNPDNSDVDKL--FIQLVQTYNQL--FEEN-- INASGVDAK---AI | 227 |
| CUO82355 | 144 | ESTEKADPRLIYLALHHIVKYRGNFLYEGQKFNMDASNIEDK--LSDVFTQFADFnnIPYEdD --KKNLEIL---EI | 214 |
| WP_033162887 | 145 | ENKEKADPRLIYLALHHIVKYRGNFLYEGQSFTMDNSDIEER--LNSAIEKFMSIneFDNRiV --SDINSMI---AV | 215 |
| AGZ01981 | 177 | DSTDKADLRLIYLALAHMIKFRGHFLIEGD-LNPDNSDVDKL--FIQLVQTYNQL--FEEN-- INASGVDAK---AI | 244 |
| AKA60242 | 144 | DSTDKADLRLIYLALAHMIKFRGHFLIEGD-LNPDNSDVDKL--FIQLVQTYNQL--FEEN-- INASGVDAK---AI | 211 |
| AKS40380 | 144 | DSTDKADLRLIYLALAHMIKFRGHFLIEGD-LNPDNSDVDKL--FIQLVQTYNQL--FEEN-- INASGVDAK---AI | 211 |
| 4UN5_B | 148 | DSTDKADLRLIYLALAHMIKFRGHFLIEGD-LNPDNSDVDKL--FIQLVQTYNQL--FEEN-- INASGVDAK---AI | 215 |
| WP_010922251 | 212 | [chemical structure] | 277 |
| WP_039695303 | 213 | LTEK-ISKSRRLENLIKY-Y-PT EKKNTLFGNLIALALGLQPNFKTNF--KLSED-A---KLQ--FSKDTYEEDLEE | 278 |
| WP_045635197 | 212 | FTDK-ISKSAKRERVLKL-F-PD EKSTGLFSEFLKLIVGNQADFKKHF--DLEDK-A---PLQ--FSKDTYDEDLEN | 277 |
| 5AXW_A | 135 | LSTK--------EQISRN-S--K ----------------------------LEEKyVa--ELQ-------------- | 157 |
| WP_009880683 | | --------------------------------------------------------------- -------------- | |
| WP_010922251 | 212 | LSAR-LSKSRRLENLIAQ-L-PG EKKNGLFGNLIALSLGLTPNFKSNF--DLAED-A---KLQ--LSKDTYDDDLDN | 277 |
| WP_011054416 | 212 | LSAR-LSKSRRLENLIAQ-L-PG EKKNGLFGNLIALSLGLTPNFKSNF--DLAED-A---KLQ--LSKDTYDDDLDN | 277 |
| WP_011284745 | 212 | LSAR-LSKSRRLENLIAQ-L-PG EKKNGLFGNLIALSLGLTPNFKSNF--DLAED-A---KLQ--LSKDTYDDDLDN | 277 |
| WP_011285506 | 212 | LSAR-LSKSRRLENLIAQ-L-PG EKKNGLFGNLIALSLGLTPNFKSNF--DLAED-A---KLQ--LSKDTYDDDLDN | 277 |
| WP_011527619 | 212 | LSAR-LSKSRRLENLIAQ-L-PG EKRNGLFGNLIALSLGLTPNFKSNF--DLAED-A---KLQ--LSKDTYDDDLDN | 277 |
| WP_012560673 | 212 | LSAR-LSKSRRLENLIAQ-L-PG EKRNGLFGNLIALSLGLTPNFKSNF--DLAED-A---KLQ--LSKDTYDDDLDN | 277 |
| WP_014407541 | 212 | LSAR-LSKSRRLENLIAQ-L-PG EKKNGLFGNLIALSLGLTPNFKSNF--DLAED-A---KLQ--LSKDTYDDDLDN | 277 |
| WP_020905136 | 212 | LSAR-LSKSRRLENLIAQ-L-PG EKKNGLFGNLIALSLGLTPNFKSNF--DLAED-A---KLQ--LSKDTYDDDLDN | 277 |
| WP_023080005 | 212 | LSAR-LSKSRRLENLIAQ-L-PG EKKNGLFGNLIALSLGLTPNFKSNF--DLAED-A---KLQ--LSKDTYDDDLDN | 277 |
| WP_023610282 | 212 | LSAR-LSKSRRLENLIAQ-L-PG EKKNGLFGNLIALSLGLTPNFKSNF--DLAED-A---KLQ--LSKDTYDDDLDN | 277 |
| WP_030125963 | 212 | LSAR-LSKSRRLENLIAQ-L-PG EKKNGLFGNLIALSLGLTPNFKSNF--DLAED-A---KLQ--LSKDTYDDDLDN | 277 |
| WP_030126706 | 212 | LSAR-LSKSRRLENLIAQ-L-PG EKRNGLFGNLIALSLGLTPNFKSNF--DLAED-A---KLQ--LSKDTYDDDLDN | 277 |
| WP_031488318 | 212 | LSAR-LSKSRRLENLIAQ-L-PG EKRNGLFGNLIALSLGLTPNFKSNF--DLAED-A---KLQ--LSKDTYDDDLDN | 277 |
| WP_032460140 | 212 | LSAR-LSKSRRLENLIAQ-L-PG EKRNGLFGNLIALSLGLTPNFKSNF--DLAED-A---KLQ--LSKDTYDDDLDN | 277 |
| WP_032461047 | 212 | LSAR-LSKSRRLENLIAQ-L-PG EKKNGLFGNLIALSLGLTPNFKSNF--DLAED-A---KLQ--LSKDTYDDDLDN | 277 |
| WP_032462016 | 212 | LSAR-LSKSRRLENLIAQ-L-PG EKKNGLFGNLIALLLGLTPNFKSNF--DLAED-A---KLQ--LSKDTYDDDLDN | 277 |
| WP_032462936 | 212 | LSAR-LSKSRRLENLIAQ-L-PG EKKNGLFGNLIALSLGLTPNFKSNF--DLAED-A---KLQ--LSKDTYDDDLDN | 277 |
| WP_032464890 | 212 | LSAR-LSKSRRLENLIAQ-L-PG EKKNGLFGNLIALSLGLTPNFKSNF--DLAED-A---KLQ--LSKDTYDDDLDN | 277 |
| WP_033888930 | 37 | LSAR-LSKSRRLENLIAQ-L-PG EKKNGLFGNLIALSLGLTPNFKSNF--DLAED-A---KLQ--LSKDTYDDDLDN | 102 |
| WP_038431314 | 212 | LSAR-LSKSRRLENLIAQ-L-PG EKKNGLFGNLIALSLGLTPNFKSNF--DLAED-T---KLQ--LSKDTYDDDLDN | 277 |
| WP_038432938 | 212 | LSAR-LSKSRRLENLIAQ-L-PG EKRNGLFGNLIALSLGLTPNFKSNF--DLAED-A---KLQ--LSKDTYDDDLDN | 277 |
| WP_038434062 | 212 | LSAR-LSKSRRLENLIAQ-L-PG EKKNGLFGNLIALSLGLTPNFKSNF--DLAED-A---KLQ--LSKDTYDDDLDN | 277 |
| BAQ51233 | 123 | LSAR-LSKSRRLENLIAQ-L-PG EKKNGLFGNLIALSLGLTPNFKSNF--DLAED-A---KLQ--LSKDTYDDDLDN | 188 |
| KGE60162 | | --------------------------------------------------------------- -------------- | |
| KGE60856 | | --------------------------------------------------------------- -------------- | |
| WP_002989955 | 212 | LSAR-LSKSRRLENLIAQ-L-PG EKKNTLFGNLIALALGLOPNFKMNF--KLSED-A---KLQ--FSKDSYEEDLGE | 277 |
| WP_003030002 | 212 | LTEK-VSKSRRLENLIAH-Y-PA QKSTGIFAEFLKLIVGNQADFKKHF--NLEDK-T---PLQ--FAKDSYDEDLEN | 277 |
| WP_003065552 | 215 | LTEK-ISKSRRLENLIKY-Y-PT QKSTGIFAEFLKLIVGNQADFKKHF--NLEDK-T---PLQ--FAKDSYDEDLEN | 280 |
| WP_001040076 | 213 | LTDK-ISKSAKKDRILAQ-Y-PN QKSTGIFAEFLKLIVGNQADFKKYF--NLEDK-T---PLQ--FAKDSYDEDLEN | 278 |
| WP_001040078 | 213 | LTDK-ISKSAKKDRILAQ-Y-PN QKSTGIFAEFLKLIVGNQADFKKYF--NLEDK-T---PLQ--FAKDSYDEDLEN | 278 |
| WP_001040080 | 213 | LTDK-ISKSAKKDRILAQ-Y-PN QKSTGIFAEFLKLIVGNQADFKKYF--NLEDK-T---PLQ--FAKDSYDEDLEN | 278 |
| WP_001040081 | 213 | LTDK-ISKSAKKDRILAQ-Y-PN QKSTGIFAEFLKLIVGNQADFKKYF--NLEDK-T---PLQ--FAKDSYDEDLEN | 278 |
| WP_001040083 | 213 | LTDK-ISKSAKKDRILAQ-Y-PN QKSTGIFAEFLKLIVGNQADFKKYF--NLEDK-T---PLQ--FAKDSYDEDLEN | 278 |
| WP_001040085 | 213 | LTDK-ISKSAKKDRILAQ-Y-PN QKSTGIFAEFLKLIVGNQADFKKYF--NLEDK-T---PLQ--FAKDSYDEDLEN | 278 |
| WP_001040087 | 213 | LTDK-ISKSAKKDRILAQ-Y-PN QKSTGIFAEFLKLIVGNQADFKKYF--NLEDK-T---PLQ--FAKDSYDEDLEN | 278 |
| WP_001040088 | 213 | LTDK-ISKSAKKDRILAQ-Y-PN QKSTGIFAEFLKLIVGNQADFKKYF--NLEDK-T---PLQ--FAKDSYDEDLEN | 278 |
| WP_001040089 | 213 | LTDK-ISKSAKKDRILAQ-Y-PN QKSTGIFAEFLKLIVGNQADFKKYF--NLEDK-T---PLQ--FAKDSYDEDLEN | 278 |
| WP_001040090 | 213 | LTDK-ISKSAKKDRILAQ-Y-PN QKSTGIFAEFLKLIVGNQADFKKYF--NLEDK-T---PLQ--FAKDSYDEDLEN | 278 |
| WP_001040091 | 213 | LTDK-ISKSAKKDRILAQ-Y-PN QKSTGIFAEFLKLIVGNQADFKKYF--NLEDK-T---PLQ--FAKDSYDEDLEN | 278 |
| WP_001040092 | 213 | LTDK-ISKSAKKDRILAQ-Y-PN QKSTGIFAEFLKLIVGNQADFKKHF--NLEDK-T---PLQ--FAKDSYDEDLEN | 278 |
| WP_001040094 | 213 | LTDK-ISKSAKKDRILAR-Y-PN QKSTGIFAEFLKLIVGNQADFKKHF--NLEDK-T---PLQ--FAKDSYDEDLEN | 278 |
| WP_001040095 | 213 | LTDK-ISKSAKKDRILAR-Y-PN QKSTGIFAEFLKLIVGNQADFKKHF--NLEDK-T---PLQ--FAKDSYDEDLEN | 278 |
| WP_001040096 | 213 | LTDK-ISKSAKKDRILAR-Y-PN QKSTGIFAEFLKLIVGNQADFKKHF--NLEDK-T---PLQ--FAKDSYDEDLEN | 278 |
| WP_001040097 | 213 | LTDK-ISKSAKKDRILAR-Y-PN QKSTGIFAEFLKLIVGNQADFKKHF--NLEDK-T---PLQ--FAKDSYDEDLEN | 278 |
| WP_001040098 | 213 | LTDK-ISKSAKKDRILAR-Y-PN QKSTGIFAEFLKLIVGNQADFKKHF--NLEDK-T---PLQ--FAKDSYDEDLEN | 278 |
| WP_001040099 | 213 | LTDK-ISKSAKKDRILAR-Y-PN QKSTGIFAEFLKLIVGNQADFKKHF--NLEDK-T---PLQ--FAKDSYDEDLEN | 278 |
| WP_001040100 | 213 | LTDK-ISKSAKKDRILAR-Y-PN QKSTGIFAEFLKLIVGNQADFKKHF--NLEDK-T---PLQ--FAKDSYDEDLEN | 278 |
| WP_001040104 | 213 | LTDK-ISKSAKKDRILAQ-Y-PN QKSTGIFAEFLKLIVGNQADFKKYF--NLEDK-T---PLQ--FAKDSYDEDLEN | 278 |
| WP_001040105 | 213 | LTDK-ISKSAKKDRILAQ-Y-PN QKSTGIFAEFLKLIVGNQADFKKYF--NLEDK-T---PLQ--FAKDSYDEDLEN | 278 |
| WP_001040106 | 213 | LTDK-ISKSAKKDRILAQ-Y-PN QKSTGIFAEFLKLIVGNQADFKKHF--NLEDK-T---PLQ--FAKDSYDEDLEN | 278 |
| WP_001040107 | 213 | LTDK-ISKSAKKDRILAQ-Y-PN QKSTGIFAEFLKLIVGNQADFKKHF--NLEDK-T---PLQ--FAKDSYDEDLEN | 278 |
| WP_001040108 | 213 | LTDK-ISKSAKKDRILAQ-Y-PN QKSTGIFAEFLKLIVGNQADFKKHF--NLEDK-T---PLQ--FAKDSYDEDLEN | 278 |
| WP_001040109 | 213 | LTDK-ISKSAKKDRILAQ-Y-PN QKSTGIFAEFLKLIVGNQADFKKHF--NLEDK-T---PLQ--FAKDSYDEDLEN | 278 |
| WP_001040110 | 213 | LTDK-ISKSAKKDRILAQ-Y-PN QKSTGIFAEFLKLIVGNQADFKKHF--NLEDK-T---PLQ--FAKDSYDEDLEN | 278 |
| WP_015058523 | 213 | LTDK-ISKSAKKDRILAQ-Y-PN QKSTGIFAEFLKLIVGNQADFKKHF--NLEDK-T---PLQ--FAKDSYDEDLEN | 278 |
| WP_017643650 | 213 | LTDK-ISKSAKKDRILAR-Y-PN QKSTGIFAEFLKLIVGNQADFKKHF--NLEDK-T---PLQ--FAKDSYDEDLEN | 278 |
| WP_017647151 | 213 | LTDK-ISKSAKKDRILAQ-Y-PN QKSTGIFAEFLKLIVGNQADFKKHF--NLEDK-T---PLQ--FAKDSYDEDLEN | 278 |
| WP_017648376 | 213 | LTDK-ISKSAKKDRILAQ-Y-PN QKSTGIFAEFLKLIVGNQADFKKHF--NLEDK-T---PLQ--FAKDSYDEDLEN | 278 |
| WP_017649527 | 213 | LTDK-ISKSAKKDRILAQ-Y-PN QKSTGIFAEFLKLIVGNQADFKKYF--NLEDK-T---PLQ--FAKDSYDEDLEN | 278 |
| WP_017771611 | 213 | LTDK-ISKSAKKDRILAQ-Y-PN QKSTGIFAEFLKLIVGNQADFKKHF--NLEDK-T---PLQ--FAKDSYDEDLEN | 278 |
| WP_017771984 | 213 | LTDK-ISKSAKKDRILAQ-Y-PN QKSTGIFAEFLKLIVGNQADFKKYF--NLEDK-T---PLQ--FAKDSYDEDLEN | 278 |
| CFQ25032 | 213 | LTDK-ISKSAKKDRILAQ-Y-PN QKSTGIFAEFLKLIVGNQADFKKYF--NLEDK-T---PLQ--FAKDSYDEDLEN | 278 |
| CFV16040 | 213 | LTDK-ISKSAKKDRILAQ-Y-PN QKSTGIFAEFLKLIVGNQADFKKYF--NLEDK-T---PLQ--FAKDSYDEDLEN | 278 |
| KLJ37842 | 213 | LTDK-ISKSAKKDRILAQ-Y-PN QKSTGIFAEFLKLIVGNQADFKKYF--NLEDK-T---PLQ--FAKDSYDEDLEN | 278 |
| KLJ72361 | 213 | LTDK-ISKSAKKDRILAQ-Y-PN QKSTGIFAEFLKLIVGNQADFKKYF--NLEDK-T---PLQ--FAKDSYDEDLEN | 278 |
| KLL20707 | 213 | LTDK-ISKSAKKDRILAQ-Y-PN QKSTGIFAEFLKLIVGNQADFKKYF--NLEDK-T---PLQ--FAKDSYDEDLEN | 278 |
| KLL42645 | 213 | LTDK-ISKSAKKDRILAQ-Y-PN QKSTGIFAEFLKLIVGNQADFKKHF--NLEDK-T---PLQ--FAKDSYDEDLEN | 278 |
| WP_047207273 | 213 | LTDK-ISKSAKKDRILAQ-Y-PN QKSTGIFAEFLKLIVGNQADFKKYF--NLEDK-T---PLQ--FAKDSYDEDLEN | 278 |
| WP_047209694 | 213 | LTDK-ISKSAKKDRILAR-Y-PN QKSTGIFAEFLKLIVGNQADFKKHF--NLEDK-T---PLQ--FAKDSYDEDLEN | 278 |
| WP_050198062 | 213 | LTDK-ISKSAKKDRILAQ-Y-PN QKSTGIFAEFLKLIVGNQADFKKYF--NLEDK-T---PLQ--FAKDSYDEDLEN | 278 |
| WP_050201642 | 213 | LTDK-ISKSAKKDRILAQ-Y-PN QKSTGIFAEFLKLIVGNQADFKKYF--NLEDK-T---PLQ--FAKDSYDEDLEN | 278 |
| WP_050204027 | 213 | LTDK-ISKSAKKDRILAQ-Y-PN QKSTGIFAEFLKLIVGNQADFKKHF--NLEDK-T---PLQ--FAKDSYDEDLEN | 278 |
| WP_050881965 | 213 | LTDK-ISKSAKKDRILAQ-Y-PN QKSTGIFAEFLKLIVGNQADFKKYF--NLEDK-T---PLQ--FAKDSYDEDLEN | 278 |
| WP_050886065 | 213 | LTDK-ISKSAKKDRILAQ-Y-PN QKSTGIFAEFLKLIVGNQADFKKYF--NLEDK-T---PLQ--FAKDSYDEDLEN | 278 |
| AHN30376 | 213 | LTDK-ISKSAKKDRILAQ-Y-PN QKSTGIFAEFLKLIVGNQADFKKHF--NLEDK-T---PLQ--FAKDSYDEDLEN | 278 |
| EAO78426 | 213 | LTDK-ISKSAKKDRILAQ-Y-PN QKSTGIFAEFLKLIVGNQADFKKYF--NLEDK-T---PLQ--FAKDSYDEDLEN | 278 |
| CCW42055 | 213 | LTDK-ISKSAKKDRILAQ-Y-PD QKSTGIFAEFLKLIVGNQADFKKHF--NLEDK-T---PLQ--FAKDSYDEDLEN | 278 |
| WP_003041502 | 212 | LTEK-VSKSRRLENLIAH-Y-PA EKKNTLFGNLIALFLGLQPNFKTNF--QLSED-A---KLQ--FSKDTYEEDLEG | 277 |
| WP_037593752 | 213 | LTEK-VSKSSRLENLIAH-Y-PT EKKNTLFGNLIALSLGLQPNFKINF--QLSED-A---KLQ--FSKDTYEEDLEE | 278 |
| WP_049516684 | 213 | LTEK-VSKSRRLENLVEC-Y-PT EKKNTLFGNLIALSLGLQPNFKINF--QLSED-A---KLQ--FSKDTYEEDLEG | 278 |
| GAD46167 | 212 | LTEK-VSKSSRLENLIAH-Y-PT EKKNTLFGNLIALSLGLQPNFKTNF--QLSED-A---KLQ--FSKDTYEEDLEE | 277 |
| WP_018363470 | 213 | LTEK-ISKSRRLENLINN-Y-PK EKKNTLFGNLIALALGLOPNFKTNF--KLSED-A---KLQ--FSKDTYEEDLEE | 278 |
| WP_003043819 | 212 | LSAR-LSKSKRLEKLIAV-F-PN EKKNGLFGNIIALALGLTPNFKSNF--DLTED-A---KLQ--LSKDTYDDDLDE | 277 |
| WP_006269658 | 212 | LTEK-VSKSSRLENLIAH-Y-PT EKKNTLFGNLIALSLDLHPNFKINF--QLSED-A---KLQ--FSKDTYEEDLEG | 277 |
| WP_048800889 | 212 | LTEK-VSKSRRLENLVKC-Y-PT EKKNTLFGNLIALSLGLOPNFKTNF--QLSED-A---KLQ--FSKDTYEEDLEE | 277 |
| WP_012767106 | 212 | LSAR-LSKSRRLENLIAQ-L-PG EKRNGLFGNLIALSLGLTPNFKSNF--DLAED-A---KLQ--LSKDTYDDDLDN | 277 |
| WP_014612333 | 212 | LSAR-LSKSKRLENLIAQ-L-PG EKKNGLFGNLIALSLGLTPNFKSNF--DLAED-A---KLQ--LSKDTYDDDLDN | 277 |
| WP_015017095 | 212 | LSAR-LSKSRRLENLIAQ-L-PG EKRNGLFGNLIALSLGLTPNFKSNF--DLAED-A---KLQ--LSKDTYDDDLDN | 277 |
| WP_015057649 | 212 | LSAR-LSKSRRLENLIAQ-L-PG EKRNGLFGNLIALSLGLTPNFKSNF--DLAED-A---KLQ--LSKDTYDDDLDN | 277 |
| WP_048327215 | 212 | LSAR-LSKSRRLENLIAQ-L-PG EKRNGLFGNLIALSLGLIPNFKSNF--DLAED-A---KLQ--LSKDTYDDDLDN | 277 |
| WP_049519324 | 212 | LSAR-LSKSRRLENLIAQ-L-PG EKRNGLFGNLIALSLGLTPNFKSNF--DLAED-A---KLQ--LSKDTYDDDLDN | 277 |
| WP_012515931 | 212 | LSAA-LSKSKRLENLISL-I-PG QKKTGIFGNIIALSLGLTPNFKANF--GLSKD-V---KLQ--LAKDTYADDLDS | 277 |
| WP_021320964 | 212 | LSAA-LSKSKRLENLISL-I-PG QKKTGIFGNIIALSLGLTPNFKANF--GLSKD-V---KLQ--LAKDTYADDLDS | 277 |
| WP_037581760 | 212 | LSAA-LSKSKRLENLISL-I-PG QKKTGIFGNIIALSLGLTPNFKANF--GLSKD-V---KLQ--LAKDTYADDLDS | 277 |
| WP_004232481 | 212 | LTEK-ISKSRRLENLIKQ-Y-PT EKKNTLFGNLVALALGLQPNFKTNF--KLSED-A---KLQ--FSKDTYDEDLEE | 277 |
| WP_009854540 | 213 | LTEK-ISKSRRLENLIKY-Y-PT EKKNTLFGNLIALALGLQPNFKMNF--KLSED-A---KLQ--FSKDTYEEDLEE | 278 |
| WP_012962174 | 213 | LTEK-FSKSRRLENLIKH-Y-PT EKKNTLFGNLVALALGLQPNFKTSF--KLSED-A---KLQ--FSKDTYEEDLEE | 278 |
| WP_039695303 | 213 | LTEK-ISKSRRLENLIKY-Y-PT EKKNTLFGNLIALALGLOPNFKTNF--KLSED-A---KLQ--FSKDTYEEDLEE | 278 |
| WP_014334983 | 212 | LTEK-VSKSRRLENLIKQ-Y-PT EKKNTLFGNLIALALGLQPNFKINF--KLSED-A---KLQ--FSKDIYEEDLEE | 277 |
| WP_003099269 | 212 | LTSK-TSKSRRLENLIAE-I-PN QKRNMLFGNLVSLALGLTPNFKTNF--ELLED-A---KLQ--ISKDSYEEDLDN | 277 |
| AHY15608 | 212 | LTSK-TSKSRRLENLIAE-I-PN QKRNMLFGNLVSLALGLTPNFKTNF--ELLED-A---KLQ--ISKDSYEEDLDN | 277 |
| AHY17476 | 212 | LTSK-TSKSRRLENLIAE-I-PN QKRNMLFGNLVSLALGLTPNFKTNF--ELLED-A---KLQ--ISKDSYEEDLDN | 277 |
| ESR09100 | | ----------------------- ------------------------------------------------------ | |
| AGM98575 | 212 | LTSK-TSKSRRLENLIAE-I-PN QKRNMLFGNLVSLALGLTPNFKTNF--ELLED-A---KLQ--ISKDSYEEDLDN | 277 |
| ALF27331 | 212 | LTDK-ISKSAKKDRVLKL-F-PN EKSNGRFAEFLKLIVGNQADFKKHF--ELEEK-A---PLQ--FSKDTYEEELEV | 277 |
| WP_018372492 | 210 | FTEN-SSKAKRVETILGL-F-PD ETAAGNLDKFLKLMLGNQADFKKVF--DLEEK----iTLQ--FSKDSYEEDLEL | 275 |
| WP_045618028 | 213 | FTDK-ISKSAKRERVLKL-F-PD EKSTGLFSEFLKLIVGNQADFKKHF--DLEEK-A---PLQ--FSKDTYDEDLEN | 278 |
| WP_045635197 | 212 | FTDK-ISKSAKRERVLKL-F-PD EKSTGLFSEFLKLIVGNQADFKKHF--DLEDK-A---PLQ--FSKDTYDEDLEN | 277 |
| WP_002263549 | 212 | LTDK-ISKSAKKDRVLKL-F-PN EKSNGRFAEFLKLIVGNQADFKKHF--ELEEK-A---PLQ--FSKDTYEEELEV | 277 |
| WP_002263887 | 212 | LTDK-ISKSAKKDRVLKL-F-PN EKSNGRFAEFLKLIVGNQADFKKHF--ELEEK-A---PLQ--FSKDTYEEELEV | 277 |
| WP_002264920 | 212 | LTEK-ISKSRRLEKLINN-Y-PK EKKNTLFRNLVALSLGLQPNFKTNF--KLSED-A---KLQ--FSKDTYEEDLEE | 277 |
| WP_002269043 | 212 | LTDK-ISKSAKKDRVLKL-F-PN EKSNGRFAEFLKLIVGNQADFKKHF--ELEEK-A---PLQ--FSKDIYEEELEV | 277 |
| WP_002269448 | 212 | LTDK-ISKSAKKDRVLKL-F-PN EKSNGRFAEFLKLIVGNQADFKKHF--ELEEK-A---PLQ--FSKDTYEEELEV | 277 |
| WP_002271977 | 212 | LTDK-ISKSAKKDRVLKL-F-PN EKSNGRFAEFLKLIVGNQADFKKHF--ELEEK-A---PLQ--FSKDTYEEDLEE | 277 |
| WP_002272766 | 212 | LTDK-ISKSAKKDRVLKL-F-PN EKSNGRFAEFLKLIVGNQADFKKHF--ELEEK-A---PLQ--FSKDTYEEDLEE | 277 |
| WP_002273241 | 212 | LTDK-ISKSAKKDRVLKL-F-PN EKSNGRFAEFLKLIVGNQADFKKHF--ELEEK-A---PLQ--FSKDTYEEELEV | 277 |
| WP_002275430 | 212 | LTDK-ISKSAKKDRVLKL-F-PN EKSNGRFAEFLKLIVGNQADFKKHF--ELEEK-A---PLQ--FSKDTYEEELEV | 277 |
| WP_002276448 | 212 | LTDK-ISKSAKKDRVLKL-F-PN EKSNGRFAEFLKLIVGNQADFKKHF--ELEEK-A---PLQ--FSKDTYEEELEV | 277 |
| WP_002277050 | 212 | LTEK-ISKSRRLEKLINN-Y-PK EKKNTLFGNLIALSLGLQPNFKINF--KLSED-A---KLQ--FSKDTYEEDLEE | 277 |
| WP_002277364 | 212 | LTDK-ISKSAKKDRVLKL-F-PN EKSNGRFAEFLKLIVGNQADFKKHF--ELEEK-A---PLQ--FSKDTYEEELEV | 277 |
| WP_002279025 | 212 | LTDK-ISKSAKKDRVLKL-F-PN EKSNGRFAEFLKLIVGNQADFKKHF--ELEEK-A---PLQ--FSKDTYEEELEV | 277 |
| WP_002279859 | 212 | LTEK-ISKSRRLEKLINN-Y-PK EKKNTLFGNLIALSLGLQPNFKTNF--KLSED-A---KLQ--FSKDTYEEELEV | 277 |
| WP_002280230 | 212 | LTDK-ISKSAKKDRVLKL-F-PN EKSNGRFAEFLKLIVGNQADFKKHF--ELEEK-A---PLQ--FSKDTYEEELEV | 277 |
| WP_002281696 | 212 | LTDK-ISKSAKKDRVLKL-F-PN EKSNGRFAEFLKLIVGNQADFKKHF--ELEEK-A---PLQ--FSKDTYEEELEV | 277 |
| WP_002282247 | 212 | LTEK-ISKSRRLEKLINN-Y-PK EKKNTLFGNLIALSLGLQPNFKTNF--KLSED-A---KLQ--FSKDTYEEDLEE | 277 |
| WP_002282906 | 212 | LTDK-ISKSAKKDRVLKL-F-PN EKSNGRFAEFLKLIVGNQADFKKHF--ELEEK-A---PLQ--FSKDTYEEELEV | 277 |
| WP_002283846 | 212 | LTDK-ISKSAKKDRVLKL-F-PN EKSNGRFAEFLKLIVGNQADFKKHF--ELEEK-A---PLQ--FSKDIYEEELEV | 277 |
| WP_002287255 | 212 | LTDK-ISKSAKKDRVLKL-F-PN EKSNGRFAEFLKLIVGNQADFKKHF--ELEEK-A---PLQ--FSKDTYEEELEV | 277 |
| WP_002288990 | 212 | LTDK-ISKSAKKDRVLKL-F-PN EKSNGRFAEFLKLIVGNQADFKKHF--ELEEK-A---PLQ--FSKDIYEEELEV | 277 |
| WP_002289641 | 212 | LTDK-ISKSAKKDRVLKL-F-PN EKSNGCFAEFLKLIVGNQADFKKHF--ELEEK-A---PLQ--FSKDTYEEELEV | 277 |
| WP_002290427 | 212 | LTDK-ISKSAKKDRVLKL-F-PN EKSNGRFAEFLKLIVGNQADFKKHF--ELEEK-A---PLQ--FSKDIYEEELEV | 277 |
| WP_002295753 | 212 | LTDK-ISKSAKKDRVLKL-F-PN EKSNGRFAEFLKLIVGNQADFKKHF--ELEEK-A---PLQ--FSKDTYEEELEV | 277 |
| WP_002296423 | 212 | LTDK-ISKSAKKDRVLKL-F-PN EKSNGRFAEFLKLIVGNQADFKKHF--ELEEK-A---PLQ--FSKDIYEEELEV | 277 |
| WP_002304487 | 212 | LTEK-VSKSRRLENLVEC-Y-PT EKKNTLFGNLIALSLGLQPNFKTNF--QLSED-A---KLQ--FSKDTYEEDLEG | 277 |
| WP_002305844 | 212 | LTDK-ISKSAKKDRVLKL-F-PN EKSNGRFAEFLKLIVGNQADFKKHF--ELEEK-A---PLQ--FSKDTYEEELEV | 277 |
| WP_002307203 | 212 | LTDK-ISKSAKKDRVLKL-F-PN EKSNGRFAEFLKLIVGNQADFKKHF--ELEEK-A---PLQ--LSKDTYEEELEV | 277 |
| WP_002310390 | 212 | LTDK-ISKSAKKDRVLKL-F-PN EKSNGRFAEFLKLIVGNQADFKKHF--ELEEK-A---PLQ--FSKDIYEEELEV | 277 |
| WP_002352408 | 212 | LTDK-ISKSAKKDRVLKL-F-PN EKSNGRFAEFLKLIVGNQADFKKHF--ELEEK-A---PLQ--FSKDIYEEELEV | 277 |
| WP_012997688 | 212 | LTDK-ISKSAKKDRVLKL-F-PN EKSNGRFAEFLKLIVGNQADFKKHF--ELEEK-A---PLQ--FSKDTYEEELEV | 277 |
| WP_014677909 | 212 | LTDK-ISKSAKKDRVLKL-F-PN EKSNGRFAEFLKLIVGNQADFKKHF--ELEEK-A---PLQ--FSKDIYEEELEV | 277 |
| WP_019312892 | 212 | LTDK-ISKSAKKDRVLKL-F-PN EKSNGRFAEFLKLIVGNQADFKKHF--ELEEK-A---PLQ--FSKDTYEEELEV | 277 |
| WP_019313659 | 212 | LTDK-ISKSAKKDRVLKL-F-PN EKSNGRFAEFLKLIIGNQADFKKHF--ELEEK-A---PLQ--FSKDTYEEELEV | 277 |
| WP_019314093 | 212 | LTDK-ISKSAKKDRVLKL-F-PN EKSNGRFAEFLKLIVGNQADFKKHF--ELEEK-A---PLQ--LSKDTYEEELEV | 277 |
| WP_019315370 | 212 | LTDK-ISKSAKKDRVLKL-F-PN EKSNGRFAEFLKLIVGNQADFKKHF--ELEEK-A---PLQ--FSKDTYEEELEV | 277 |
| WP_019803776 | 212 | LTDK-ISKSAKKDRVLKL-F-PN EKSNGRFAEFLKLIVGNQADFKKHF--ELEEK-V---PLQ--FSKDTYEEELEV | 277 |
| WP_019805234 | 212 | LTDK-ISKSAKKDRVLKL-F-PN EKSNGRFAEFLKLIVGNQADFKKHF--ELEEK-A---PLQ--FSKDIYEEELEV | 277 |
| WP_024783594 | 212 | LTDK-ISKSAKKDRVLKL-F-PN EKSNGRFAEFLKLIVGNQADFKKHF--ELEEK-A---PLQ--FSKDTYEEELEV | 277 |
| WP_024784288 | 212 | LTEK-ISKSRRLEKLINN-Y-PK EKKNTLFGNLIALSLGLQPNFKTNF--KLSED-A---KLQ--FSKDTYEEDLEE | 277 |
| WP_024784666 | 212 | LTDK-ISKSAKKDRVLKL-F-PN EKSNGRFAEFLKLIVGNQADFKKHF--ELEEK-A---PLQ--FSKDTYEEELEV | 277 |
| WP_024784894 | 212 | LTDK-ISKSAKKDRVLKL-F-PN EKSNGRFAEFLKLIVGNQADFKKHF--ELEEK-A---PLQ--FSKDTYEEELEV | 277 |
| WP_024786433 | 212 | LTEK-ISKSRRLEKLINN-Y-PK EKKNTLFGNLIALSLGLQPNFKTNF--KLSED-A---KLQ--FSKDTYEEDLEE | 277 |
| WP_049473442 | 212 | LTDK-ISKSAKKDRVLKL-F-PN EKSNGRFAEFLKLIVGNQADFKKHF--ELEEK-A---PLQ--FSKDTYEEDLEE | 277 |
| WP_049474547 | 212 | LTDK-ISKSAKKDRVLKL-F-PN EKSNGRFAEFLKLIVGNQADFKKHF--ELEEK-A---PLQ--FSKDTYEEELEV | 277 |
| EMC03581 | 205 | LTDK-ISKSAKKDRVLKL-F-PN EKSNGRFAEFLKLIVGNQADFKKHF--ELEEK-A---PLQ--FSKDTYEEELEV | 270 |
| WP_000428612 | 213 | FTDK-ISKSAKRERVLKL-F-PD EKSTGLFSEFLKLIVGNQADFKKHF--DLEEK-A---PLQ--FSRDTYDEDLEN | 278 |
| WP_000428613 | 213 | FTDK-ISKSAKRERVLKL-F-PD EKSTGLFSEFLKLIVGNQADFKKHF--DLGEK-A---PLQ--FSKDTYDEDLEN | 278 |
| WP_049523028 | 212 | FTDK-ISKSAKRDRVLKL-F-PD EKSTGLFSEFLKLIVGNQADFKKHF--DLEEK-A---PLQ--FSKDTYEEDLES | 277 |
| WP_003107102 | 181 | LTEK-MSKSRRLENLIAK-I-PN QKKNTLFGNLISLSLGLTPNFKANF--ELSED-A---KLQ--ISKESFEEDLDN | 246 |
| WP_054279288 | 214 | LTEK-ISKTRRLENLISN-I-PG QKKNGLFGNLIALSLGLTPNFKSHF--NLPED-A---KLQ--LAKDTYDEELNN | 279 |
| WP_049531101 | 213 | FTDK-ISKSTKRERVLKL-F-PD QKSTGLFSEFLKLIVGNQADFKKHF--DLEEK-A---PLQ--FSKDTYDEDLEN | 278 |
| WP_049538452 | 213 | FSDK-ISKSAKRERVLKL-F-PD EKSTGLFSEFLKLIVGNQADFKKHF--DLEEK-A---PLQ--FSKDTYDEDLEN | 278 |
| WP_049549711 | 213 | FTDK-ISKSAKRERVLKL-F-PD EKSTGLFSEFLKLIVGNQADFKKHF--DLGEK-A---PLQ--FSKDTYDEDLEN | 278 |
| WP_007896501 | 214 | LTAK-TSKSKRLESLISE-F-PG QKKNGLFGNLLALALGLRPNFKSNF--GLSED-A---KLQ--ITKDTYEEELDN | 279 |
| EFR44625 | 166 | LTAK-TSKSKRLESLISE-F-PG QKKNGLFGNLLALALGLRPNFKSNF--GLSED-A---KLQ--ITKDTYEEELDN | 231 |
| WP_002897477 | 212 | FTDK-ISKSAKRERVLKL-F-PD EKSTGLFSEFLKLIVGNQADFKKHF--DLEEK-A---PLQ--FSKDTYDEELEN | 277 |
| WP_002906454 | 212 | FTDK-ISKSTKRERVLKL-F-SD EKSTGLFSEFLKLIVGNQADFKKHF--DLEEK-A---PLQ--FSKDTYDEDLEN | 277 |
| WP_009729476 | 213 | FTDK-ISKSAKRERVLKL-F-PD EKSTGLFSEFLKLIVGNQADFKKHF--DLEEK-A---PLQ--FSRDTYDEDLEN | 278 |
| CQR24647 | 212 | ITAK-ISKSRKVEAVLEQ-F-PD QKKNSFFGNMVSLVFGLMPNFKSNF--ELDED-A---KLQ--FSRDSYDEDLEN | 277 |
| WP_000066813 | 213 | FTDK-ISKSTKRERVLKL-F-PD EKSTGLFSEFLKLIVGNQADFKKHF--DLEEK-A---PLQ--FSKDTYDEDLEN | 278 |
| WP_009754323 | 213 | FTGK-ISKSVKREHVLKL-F-PD EKSTGLFSEFLKLIVGNQADFKKHF--DLEEK-A---SLQ--FSKDTYDEDLEN | 278 |
| WP_044674937 | 212 | LVEK-VSKSRRLENILHY-F-PN EKKNGLFGNFLALALGLQPNFKTNF--ELAED-A---KIQ--FSKETYEEDLEE | 277 |
| WP_044676715 | 212 | LVEK-VSKSRRLENILHY-F-PN EKKNGLFGNFLTLALGLQPNFKTNF--ELAED-A---KIQ--FSKETYEEDLEE | 277 |
| WP_044680361 | 212 | LVEK-VSKSRRLENILHY-F-PN EKKNGLFGNFLALALGLQPNFKINF--ELAED-A---KIQ--FSKETYEEDLEE | 277 |
| WP_044681799 | 212 | LVEK-VSKSRRLENILHY-F-PN EKKNGLFGNFLALALGLQPNFKTNF--ELAED-A---KIQ--FSKETYEEDLEE | 277 |
| WP_049533112 | 212 | LTEK-VSKSRRLENLIAH-Y-PA EKKNTLFGNLIALSLGLQPNFKINF--QLSED-A---KLQ--FSKDTYEEDLEG | 277 |
| WP_029090905 | 172 | LLDRmMNRSSKVKFLIEL---TG KQDKPLLKELFNLIVGLKAKPASIFe---QEN1AtivETM-nMSTEQVOLDLLT | 243 |
| WP_006506696 | 211 | LKKP-LSKKAKVDEVMTL-IaPE KDYKSAFKELVTGIAGNKMNVTKMIIcEPIKQ-Gds-EIK1kFSDSNYDDQFSE | 283 |
| AIT42264 | 212 | LSAR-LSKSRRLENLIAQ-L-PG EKKNGLFGNLIALSLGLTPNFKSNF--DLAED-A---KLQ--LSKDTYDDDLDN | 277 |
| WP_034440723 | 218 | FKQD-ISRSKKLDQAIAL-F-QG -KRQSLFGIFLTLIVGNKANFQKIF--NLEDD----IKLD--LKEEDYDENLEE | 283 |
| AKQ21048 | 212 | LSAR-LSKSRRLENLIAQ-L-PG EKKNGLFGNLIALSLGLTPNFKSNF--DLAED-A---KLQ--LSKDTYDDDLDN | 277 |
| WP_004636532 | 211 | LSSK-QSRSRKHEQIMAL-F-PN ENKLGNFGRFMMLIVGNTSNFKPVF--DLDDE-Y---KLK--LSDETYEEDLDT | 276 |
| WP_002364836 | 218 | LTEK-ASRTKKSEKVLQQ-F-PQ EKANGLFGQFLKLMVGNKADFKKVF--GLEEE-A---KI--tYASESYEEDLEG | 283 |
| WP_016631044 | 169 | LTEK-ASRTKKSEKVLQQ-F-PQ EKANGLFGQFLKLMVGNKADFKKVF--GLEEE-A---KI--tYASESYEEDLEG | 234 |
| EMS75795 | 1 | ----------------------- ----------------------------MDEE-A---KIQ--LSKESYEEELES | 20 |
| WP_002373311 | 218 | LTEK-ASRTKKSEKVLQQ-F-PQ EKANGLFGQFLKLMVGNKADFKKVF--GLEEE-A---KI--tYASESYEEDLEG | 283 |
| WP_002378009 | 218 | LTEK-ASRTKKSEKVLQQ-F-PQ EKANGLFGQFLKLMVGNKADFKKVF--GLEEE-A---KI--tYASESYEEDLEG | 283 |
| WP_002407324 | 218 | LTEK-ASRTKKSEKVLQQ-F-PQ EKANGLFGQFLKLMVGNKADFKKVF--GLEEE-A---KI--tYASESYEEDLEG | 283 |
| WP_002413717 | 218 | LTEK-ASRTKKSEKVLQQ-F-PQ EKANGLFGQFLKLMVGNKADFKKVF--GLEEE-A---KI--tYASESYEEDLEG | 283 |
| WP_010775580 | 218 | LTEK-ASRTKKSEKVLQQ-F-PQ EKANGLFGQFLKLMVGNKADFKKVF--GLEEE-A---KIKitYASESYEEDLEG | 285 |
| WP_010818269 | 218 | LTEK-ASRTKKSEKVLQQ-F-PQ EKANGLFGQFLKLMVGNKADFKKVF--GLEEE-A---KI--tYASESYEEDLEG | 283 |
| WP_010824395 | 218 | LTEK-ASRTKKSEKVLQQ-F-PQ EKANGLFGQFLKLMVGNKADFKKVF--GLEEE-A---KI--tYASESYEEDLEG | 283 |
| WP_016622645 | 218 | LTEK-ASRTKKSEKVLQQ-F-PQ EKANGLFGQFLKLMVGNKADFKKVF--GLEEE-A---KI--tYASESYEEDLEG | 283 |
| WP_033624816 | 218 | LTEK-ASRTKKSEKVLQQ-F-PQ EKANGLFGQFLKLMVGNKADFKKVF--GLEEE-A---KI--tYASESYEEDLEG | 283 |
| WP_033625576 | 218 | LTEK-ASRTKKSEKVLQQ-F-PQ EKANGLFGQFLKLMVGNKADFKKVF--GLEEE-A---KI--tYASESYEEDLEG | 283 |
| WP_033789179 | 218 | LTEK-ASRTKKSEKVLQQ-F-PQ EKANGLFGQFLKLMVGNKADFKKVF--GLEEE-A---KI--tYASESYEEDLEG | 283 |
| WP_002310644 | 217 | FTEK-MSKTKKAETLLKY-F-PH EKSNGYLSQFIKLMVGNQGNFKNVF--GL-EE-A---KLQ--FSKETYEEDLEE | 281 |
| WP_002312694 | 217 | FTEK-MSKTKKAETLLKY-F-PH EKSNGYLSQFIKLMVGNQGNFKNVF--GL-EEeA---KLQ--FSKETYEEDLEE | 282 |
| WP_002314015 | 217 | FTEK-MSKTKKAETLLKY-F-PH EKSNGYLSQFIKLMVGNQGNFKNVF--GL-EEeA---KLQ--FSKETYEEDLEE | 282 |
| WP_002320716 | 217 | FTEK-MSKTKKAETLLKY-F-PH EKSNGYLSQFIKLMVGNQGNFKNVF--GL-EEeA---KLQ--FSKETYEEDLEE | 282 |
| WP_002330729 | 217 | FTEK-MSKTKKAETLLKY-F-PH EKSNGYLSQFIKLMVGNQGNFKNVF--GL-EE-A---KLQ--FSKETYEEDLEE | 281 |
| WP_002335161 | 217 | FTEK-MSKTKKAETLLKY-F-PH EKSNGYLSQFIKLMVGNQGNFKNVF--GL-EEeA---KLQ--FSKETYEEDLEE | 282 |
| WP_002345439 | 217 | FTEK-MSKTKKAETLLKY-F-PH EKSNGYLSQFIKLMVGNQGNFKNVF--GL-EEeA---KLQ--FSKETYEEDLEE | 282 |
| WP_034867970 | 210 | LTDK-LSKTKKVEEILKY-Y-PT EKINSFFAQCLKLIVGNQANFKRIF--DLEAE-V---KLQ--FSKETYEEDLES | 275 |
| WP_047937432 | 217 | FTEK-MSKTKKAETLLKY-F-PH EKSNGYLSQFIKLMVGNQGNFKNVF--GL-EEeA---KLQ--FSKETYEEDLEE | 282 |
| WP_010720994 | 210 | LTDK-LSKTKKVEEILKY-Y-PT EKINSFFAQCLKLIVGNQANFKRIF--DLEAE-V---KLQ--FSKETYEEDLES | 275 |
| WP_010737004 | 210 | LTDK-LSKTKKVEEILKY-Y-PT EKINSFFAQCLKLIVGNQANFKRIF--DLEAE-V---KLQ--FSKETYEEDLES | 275 |
| WP_034700478 | 210 | LTDK-LSKTKKVEEILKY-Y-PT EKINSFFAQCLKLIVGNQANFKRIF--DLEAE-V---KLQ--FSKETYEEDLES | 275 |
| WP_007209003 | 215 | LTQQ-LSKSERADNVLKL-F-PD EKGTGIFAQFIKLIVGNQGNFKKVF--QLEED----qKLQ--LSTDDYEENIEN | 280 |
| WP_023519017 | 210 | LTER-LSKAKRVEKVLAY-Y-PS EKSTGNFAQFLKLMVGNQANFKKTF--DLEEE-M---KLN--FTRDCYEEDLNE | 275 |
| WP_010770040 | 213 | FSEK-VSRARKVEAILSV-Y-SE EKSTGTLAQFLKLMVGNQGRFKKTF--DLEED-G---IIQ--IPKEEYEEELET | 278 |
| WP_048604708 | 209 | FADK-VSRAKKAEGVLAL-F-PD EKRNGTFDQFLKMIVGNQGNFKKTF--ELEED-A---KLQ--FSKEEYDESLEA | 274 |
| WP_010750235 | 210 | LTDK-LSKSKKVEKILQY-Y-PK EKTTGCLAQFLKLIVGNQGNFKQAF--HLDEE-V---KIQ--ISKETYEEDLEK | 275 |
| AII16583 | 251 | LSAR-LSKSRRLENLIAQ-L-PG EKKNGLFGNLIALSLGLTPNFKSNF--DLAED-A---KLQ--LSKDTYDDDLDN | 316 |
| WP_029073316 | 216 | LKEP-LSKKHKADKAFAL-FdTT KDNKAAYKELCAALAGNKFNVTKMLkeAELHD-EdekDISfkFSDATEDDAFVE | 289 |
| WP_031589969 | 216 | LKEP-LSKKHKAEKAFAL-FdTT KDNKAAYKELCAALAGNKFNVTKMLkeAELHD-EdekDISfkFSDATFDDAFVE | 289 |
| KDA45870 | 210 | FKDNtFSKTKKSEELLKL---SG -KKNQLAHQLFKMMVGNMGSFKKVL--GTDEE----hKLS--FGKDTYEDDLND | 275 |
| WP_039099354 | 207 | LLDNhQSASNRORQALLLiYtPS KONKAIATELLKAILGLKAKFNVLT--GIEAEdVktwTLT--FNAENFDEEMVK | 285 |
| AKP02966 | 209 | LIGR-GNATQKSSNILNN-F--T KETKKLLKEVINLILGNVAHLNTIFktSLTKDeE---KLS--FSGKDIESKLDD | 278 |
| WP_010991369 | 218 | LVEK-VTRKEKLERILKL-Y-PG EKSAGMFAQFISLIVGSKGNFQKPF--DLIEK-S---DIE--CAKDSYEEDLES | 283 |
| WP_033838504 | 218 | LVEK-VTRKEKLERILKL-Y-PG EKSAGMFAQFISLIVGSKGNFQKPF--DLIEK-S---DIE--CAKDSYEEDLES | 283 |
| EHN60060 | 221 | LVEK-VTRKEKLERILKL-Y-PG EKSAGMFAQFISLIVGSKGNFQKPF--DLIEK-S---DIE--CAKDSYEEDLES | 286 |
| EFR89594 | 1 | ---------------LKL-Y-PG EKSTGMFAQFISLIVGSKGNFQKPF--DLIEK-S---DIE--CAKDSYEEDLES | 52 |
| WP_038409211 | 218 | LSEK-LTRREKLDKILKL-Y-TG EKSTGMFARFINLIIGSKGDFKKVF--DLDEK-A---EIE--CAKDTYEEDLEA | 283 |
| EFR95520 | | ----------------------- ------------------------------------------------------ | |
| WP_003723650 | 218 | LAGK-FTRREKFERILQL-Y-PG EKSTGMFAQFISLIVGSKGNFQKVF--DLIEK-T---DIE--CAKDSYEEDLET | 283 |
| WP_003727705 | 218 | LAGK-FTRREKFERILRL-Y-PG EKSTGMFAQFISLIVGNKGNFQKVF--NLVEK-T---DIE--CAKDSYEEDLEA | 283 |
| WP_003730785 | 218 | LAGK-FTRREKFERILRL-Y-PG EKSTGMFAQFISLIVGNKGNFQKVF--NLVEK-T---DIE--CAKDSYEEDLEA | 283 |
| WP_003733029 | 218 | LAEK-FTRKDKLDKILSL-Y-PG EKTTGVFAQFVNIIVGSTGKFKKHF--NLHEK-K---DIN--CAEDTYDTDLES | 283 |
| WP_003739838 | 218 | LAGK-FTRKEKLERILQL-Y-PG EKSTGMFAQFISLIVGSKGNFQKVF--DLVEK-T---DIE--CAKDSYEEDLEA | 283 |
| WP_014601172 | 218 | LAGK-FTRREKFERILQL-Y-PG EKSTGMFAQFISLIVGSKGNFQKVF--DLIEK-T---DIE--CAKDSYEEDLEA | 283 |
| WP_023548323 | 218 | LAGK-FTRREKFERILQL-Y-PG EKSTGMFAQFISLIVGSKGNFQKVF--DLIEK-T---DIE--CAKDSYEEDLET | 283 |
| WP_031665337 | 218 | LAGK-FTRREKFERILQL-Y-PG EKSTGMFAQFISLIVGSKGNFQKVF--DLIEK-T---DIE--CAKDSYEEDLET | 283 |
| WP_031669209 | 218 | LAEK-FTRKDKLDKILSL-Y-PG EKTTGVFAQFVNIIVGSTGKFKKHF--NLHEK-K---DIN--CAEDTYDTDLES | 283 |
| WP_033920898 | 218 | LARK-FTRREKFERILQL-Y-PG EKSTGMFAQFISLIVGSKGNFQKVF--DLIEK-T---DIE--CAKDSYEEDLET | 283 |
| AKI42028 | 221 | LAGK-FTRREKFERILQL-Y-PG EKSTGMFAQFISLIVGSKGNFQKVF--DLIEK-T---DIE--CAKDSYEEDLEA | 286 |
| AKI50529 | 221 | LARK-FTRREKFERILQL-Y-PG EKSTGMFAQFISLIVGSKGNFQKVF--DLIEK-T---DIE--CAKDSYEEDLET | 286 |
| EFR83390 | | ----------------------- ------------------------------------------------------ | |
| WP_046323366 | 218 | FSEK-LTKREKLDKILNL-Y-PN EKSTDLFAQFISLIIGSKGNFKKFF--NLTEK-T---DIE--CAKDSYEEDLEV | 283 |
| AKE81011 | 228 | LSAR-LSKSRRLENLIAQ-L-PG EKKNGLFGNLIALSLGLTPNFKSNF--DLAED-A---KLQ--LSKDTYDDDLDN | 293 |
| CUO82355 | 215 | LKKP-LSKKAKVDEVMAL-IsPE KEFKSAYKELVIGIAGNKMNVTKMIICESIKQ-Gds-EIK1kFSDSNYDDQFSE | 287 |
| WP_033162887 | 216 | LSKI-YQRSKKADDLLKI-MnPT KEEKAAYKEFTKALVGLKFNISKMIlaQEVKK-Gdt-DIVleFSNANYDSTIDE | 288 |
| AGZ01981 | 245 | LSAR-LSKSRRLENLIAQ-L-PG EKKNGLFGNLIALSLGLTPNFKSNF--DLAED-A---KLQ--LSKDTYDDDLDN | 310 |
| AKA60242 | 212 | LSAR-LSKSRRLENLIAQ-L-PG EKKNGLFGNLIALSLGLTPNFKSNF--DLAED-A---KLQ--LSKDTYDDDLDN | 277 |
| AKS40380 | 212 | LSAR-LSKSRRLENLIAQ-L-PG EKKNGLFGNLIALSLGLTPNFKSNF--DLAED-A---KLQ--LSKDTYDDDLDN | 277 |
| 4UN5_B | 216 | LSAR-LSKSRRLENLIAQ-L-PG EKKNGLFGNLIALSLGLTPNFKSNF--DLAED-A---KLQ--LSKDTYDDDLDN | 281 |
| WP_010922251 | 278 | [chemical structure] | 356 |
| WP_039695303 | 279 | LLGKIGDDYADLFTSAKNLYDAILLSGILTVDDNSTKAPLSASMIKRYVEHHEDLEKLKEFIKAN-KSELYHDIFKDKNK | 357 |
| WP_045635197 | 278 | LLGQIGDDFTDLFVSAKKLYDAILLSGILTVTDPSTKAPLSASMIERYENHONDLAALKOFIKNN-LPEKYDEVESDQSK | 356 |
| 5AXW_A | 158 | ---------------------------------------------------------LERLKKDG-------EVR----- | 168 |
| WP_009880683 | 1 | ---------------------------------------LSASMIKRYDEHHQDLTLLKALVRQQ-LPEKYKEIFFDQSK | 40 |
| WP_010922251 | 278 | LLAQIGDQYADLFLAAKNLSDAILLSDILRVNTEITKAPLSASMIKRYDEHHODLTLLKALVRQQ-LPEKYKEIFFDQSK | 356 |
| WP_011054416 | 278 | LLAQIGDQYADLFLAAKNLSDATLLSDILRVNSEITKAPLSASMIKRYDEHHQDLTLLKALVRQQ-LPEKYKEIFFDQSK | 356 |
| WP_011284745 | 278 | LLAQIGDQYADLFLAAKNLSDAILLSDILRLNSEITKAPLSASMIKRYDEHHODLTLLKALVRQQ-LPEKYKEIFFDQSK | 356 |
| WP_011285506 | 278 | LLAQIGDQYADLFLAAKNLSDAILLSDILRVNTEITKAPLSASMIKRYDEHHQDLTLLKALVROQ-LPEKYKEIFFDQSK | 356 |
| WP_011527619 | 278 | LLAQIGDQYADLFLAAKNLSDAILLSDILRLNSEITKAPLSASMIKRYDEHHQDLTLLKALVRQQ-LPEKYKEIFFDQSK | 356 |
| WP_012560673 | 278 | LLAQIGDQYADLFLAAKNLSDAILLSDILRVNTEITKAPLSASMIKRYDEHHQDLTLLKALVRQQ-LPEKYKEIFFDQSK | 356 |
| WP_014407541 | 278 | LLAQIGDQYADLFLAAKNLSDAILLSDILRVNSEITKAPLSASMIKRYDEHHQDLTLLKALVRQQ-LPEKYKEIFFDQSK | 356 |
| WP_020905136 | 278 | LLAQIGDQYADLFLAAKNLSDAILLSDILRLNSEITKAPLSASMIKRYDEHHQDLTLLKALVROQ-LPEKYKEIFFDQSK | 356 |
| WP_023080005 | 278 | LLAQIGDQYADLFLAAKNLSDAILLSDILRVNSEITKAPLSASMIKRYDEHHQDLTLLKALVRQQ-LPEKYKEIFFDQSK | 356 |
| WP_023610282 | 278 | LLAQIGDQYADLFLAAKNLSDAILLSDILRVNSEITKAPLSASMIKRYDEHHQDLTLLKALVRQQ-LPEKYKEIFFDQSK | 356 |
| WP_030125963 | 278 | LLAQIGDQYADLFLAAKNLSDAILLSDILRVNTEITKASLSASMIKRYDEHHQDLTLLKALVROQ-LPEKYKEIFFDQSK | 356 |
| WP_030126706 | 278 | LLAQIGDQYADLFLAAKNLSDATLLSDILRVNSEITKAPLSASMIKRYDEHHQDLTLLKALVROQ-LPEKYKEIFFDQSK | 356 |
| WP_031488318 | 278 | LLAQIGDQYADLFLAAKNLSDAILLSDILRVNSEITKAPLSASMIKRYDEHHQDLTLLKALVRQQ-LPEKYKEIFFDQSK | 356 |
| WP_032460140 | 278 | LLAQIGDQYADLFLAAKNLSDAILLSDILRVNTEITKAPLSASMIKRYDEHHQDLTLLKALVROQ-LPEKYKEIFFDQSK | 356 |
| WP_032461047 | 278 | LLAQIGDQYADLFLAAKNLSDAILLSDILRVNTEITKAPLSASMIKRYDEHHQDLTLLKALVROQ-LPEKYKEIFFDQSK | 356 |
| WP_032462016 | 278 | LLAQIGDQYADLFLAAKNLSDAILLSDILRVNTEITKAPLSASMIKRYDEHHQDLTLLKALVRQQ-LPEKYKEIFFDQSK | 356 |
| WP_032462936 | 278 | LLAQIGDQYADLFLAAKNLSDAILLSDILRVNSEITKAPLSASMIKRYDEHHQDLTLLKALVRQQ-LPEKYKEIFFDQSK | 356 |
| WP_032464890 | 278 | LLAQIGDQYADLFLAAKNLSDAILLSDILRLNSEITKAPLSASMIKRYDEHHQDLTLLKALVRQQ-LPEKYKEIFFDQSK | 356 |
| WP_033888930 | 103 | LLAQIGDQYADLFLAAKNLSDAILLSDILRVNTEITKAPLSASMIKRYDEHHQDLILLKALVRQQ-LPEKYKEIFFDQSK | 181 |
| WP_038431314 | 278 | LLAQIGDQYADLFLAAKNLSDATLLSDILRVNSEITKAPLSASMIKRYDEHHODLTLLKALVRQQ-LPEKYKEIFFDQSK | 356 |
| WP_038432938 | 278 | LLAQIGDQYADLFLAAKNLSDAILLSDILRVNSEITKAPLSASMIKRYDEHHQDLILLKALVRQQ-LPEKYKEIFFDQSK | 356 |
| WP_038434062 | 278 | LLAQIGDQYADLFLAAKNLSDAILLSDILRVNSEITKAPLSASMIKRYDEHHQDLTLLKALVRQQ-LPEKYKEIFFDQSK | 356 |
| BAQ51233 | 189 | LLAQIGDQYADLFLAAKNLSDAILLSDILRVNTEITKAPLSASMIKRYDEHHQDLTLLKALVRQQ-LPEKYKEIFFDQSK | 267 |
| KGE60162 | | -------------------------------------------------------------------------------- | |
| KGE60856 | | -------------------------------------------------------------------------------- | |
| WP_002989955 | 278 | LLAQIGDQYADLFLAAKNLSDAILLSDILRLNSEITKAPLSASMIKRYDEHHQDLTLLKALVRQQ-LPEKYKEIFFDQSK | 356 |
| WP_003030002 | 278 | LLGEIGDEYADLFASAKNLYDAILLSGILTVDDNSTKAPLSASMVKRYEEHQKDLKKLKDFIKVN-APDQYNAIFKDKNK | 356 |
| WP_003065552 | 281 | LLGKIGDDYADLFTSAKNLYDAILLSGILIVDDNSTKAPLSASMIKRYVEHQEDLEKLKEFIKAN-KSELYHDIFKDKNK | 359 |
| WP_001040076 | 279 | LLGQIGDEFADLFSAAKKLYDSVLLSGILTVTDLSTKAPLSASMIQRYDEHREDLKOLKQFVKAS-LPEKYQEIVADSSK | 357 |
| WP_001040078 | 279 | LLGQIGDEFADLFSAAKKLYDSVLLSGILTVIDLSTKAPLSASMIQRYDEHREDLKOLKOFVKAS-LPEKYQEIFADSSK | 357 |
| WP_001040080 | 279 | LLGQIGDEFADLFSAAKKLYDSVLLSGILTVIDLSTKAPLSASMIQRYDEHREDLKOLKQFVKAS-LPEKYQEIFADSSK | 357 |
| WP_001040081 | 279 | LLGQIGDEFADLFSAAKKLYDSVLLSGILTVIDLSTKAPLSASMIQRYDEHREDLKOLKOFVKAS-LPEKYQEIFADSSK | 357 |
| WP_001040083 | 279 | LLGQIGDEFADLFSAAKKLYDSVLLSGILTVIDLSTKAPLSASMIQRYDEHREDLKOLKOFVKAS-LPEKYQEIFADSSK | 357 |
| WP_001040085 | 279 | LLGQIGDEFADLFSAAKKLYDSVLLSGILTVIDLSTKAPLSASMIQRYDEHREDLKOLKQFVKAS-LPEKYQEIFADSSK | 357 |
| WP_001040087 | 279 | LLGQIGDEFADLFSAAKKLYDSVLLSGILTVIDLSTKAPLSASMIQRYDEHREDLKOLKOFVKAS-LPEKYQEIFADSSK | 357 |
| WP_001040088 | 279 | LLGQIGDEFADLFSAAKKLYDSVLLSGILTVIDLSTKAPLSASMIQRYDEHREDLKOLKQFVKAS-LPEKYQEIFADSSK | 357 |
| WP_001040089 | 279 | LLGQIGDEFADLFSAAKKLYDSVLLSGILTVIDLSTKAPLSASMIQRYDEHREDLKOLKQFVKAS-LPEKYQEIFADSSK | 357 |
| WP_001040090 | 279 | LLGQIGDEFADLFSAAKKLYDSVLLSGILTVIDLSTKAPLSASMIQRYDEHREDLKOLKQFVKAS-LPEKYQEIFADSSK | 357 |
| WP_001040091 | 279 | LLRQIGDEFADLFSAAKKLYDSVLLSGILTVIDLSTKAPLSASMIQRYDEHREDLKOLKQFVKAS-LPEKYQEIFADSSK | 357 |
| WP_001040092 | 279 | LLGQIGDEFADLFSAAKKLYDSVLLSGILTVTDLSTKAPLSAYMIQRYDEHREDLKOLKQFVKAS-LPEKYQEIFADSSK | 357 |
| WP_001040094 | 279 | LLGQIGDEFADLFSAAKKLYDSVLLSGILTVTDLSTKAPLSASMIQHYDEHREDLKOLKQFVKAS-LPEKYQEIFADSSK | 357 |
| WP_001040095 | 279 | LLGQIGDEFADLFSAAKKLYDSVLLSGILTVTDLSTKAPLSASMIQRYDEHREDLKOLKQFVKAS-LPEKYQEIFADSSK | 357 |
| WP_001040096 | 279 | LLGQIGDEFADLFSAAKKLYDSVLLSGILTVTDLSTKAPLSASMIQRYDEHREDLKOLKQFVKAS-LPEKYQEIFADSSK | 357 |
| WP_001040097 | 279 | LLGQIGDEFADLFSAAKKLYDSVLLSGILTVTDLSTKAPLSASMIQRYDEHREDLKOLKQFVKAS-LPEKYQEIFADSSK | 357 |
| WP_001040098 | 279 | LLGQIGDEFADLFSAAKKLYDSVLLSGILTVTDLSTKAPLSASMIQRYDEHREDLKOLKOFVKAS-LPEKYQEIFADSSK | 357 |
| WP_001040099 | 279 | LLGQIGDEFADLFSAAKKLYDSVLLSGILTVTDLSTKAPLSASMIQRYDEHREDLKOLKQFVKAS-LPEKYQEIFADSSK | 357 |
| WP_001040100 | 279 | LLGQIGDEFADLFSAAKKLYDSVLLSGILTVTDLSTKAPLSASMIQRYDEHREDLKOLKQFVKAS-LPEKYQEIFADSSK | 357 |
| WP_001040104 | 279 | LLGQIGDEFADLFSAAKKLYDSVLLSGILTVIDLSTKAPLSASMIQRYDEHREDLKOLKQFVKAS-LPEKYQEIFADSSK | 357 |
| WP_001040105 | 279 | LLGQIGDEFADLFSAAKKLYDSVLLSGILTVIDLSTKAPLSASMIQRYDEHREDLKOLKQFVKAS-LPEKYQEIFADSSK | 357 |
| WP_001040106 | 279 | LLGQIGDEFADLFSVAKKLYDSVLLSGILTVTDLSTKAPLSASMIQRYDEHREDLKOLKQFVKAS-LPEKYQEIFTDSSK | 357 |
| WP_001040107 | 279 | LLGQIGDEFADLFSVAKKLYDSVLLSGILTVTDLSTKAPLSASMIQRYDEHREDLKOLKQFVKAS-LPEKYQEIFTDSSK | 357 |
| WP_001040108 | 279 | LLGQIGDEFADLFSVAKKLYDSVLLSGILTVTDLSTKAPLSASMIQRYDEHREDLKOLKQFVKAS-LPEKYQEIFTDSSK | 357 |
| WP_001040109 | 279 | LLGQIGDEFADLFSVAKKLYDSVLLSGILTVTDLSTKAPLSASMIQRYDEHREDLKOLKQFVKAS-LPEKYQEIFTDSSK | 357 |
| WP_001040110 | 279 | LLGQIGDEFADLFSVAKKLYDSVLLSGILTVTDLSTKAPLSASMIQRYDEHREDLKOLKQFVKAS-LPEKYQEIFTDSSK | 357 |
| WP_015058523 | 279 | LLGQIGDEFADLFSAAKKLYDSVLLSGILTVTDLSTKAPLSASMIQRYDEHREDLKOLKQFVKAS-LPEKYQEIFADSSK | 357 |
| WP_017643650 | 279 | LLGQIGDEFADLFSAAKKLYDSVLLSGILTVTDLSTKAPLSASMIQRYDEHREDLKOLKQFVKAS-LPEKYQEIFADSSK | 357 |
| WP_017647151 | 279 | LLGQIGDEFADLFSVAKKLYDSVLLSGILTVTDLSTKAPLSASMIQRYDEHREDLKOLKQFVKAS-LPEKYQEIFTDSSK | 357 |
| WP_017648376 | 279 | LLGQIGDEFADLFSVAKKLYDSVLLSGILTVTDLSTKAPLSASMIQRYDEHREDLKOLKQFVKAS-LPEKYQEIFTDSSK | 357 |
| WP_017649527 | 279 | LLGQIGDEFADLFSAAKKLYDSVLLSGILTVIDLSTKAPLSASMIQRYDEHREDLKOLKQFVKAS-LPEKYQEIFADSSK | 357 |
| WP_017771611 | 279 | LLGQIGDEFADLFSVAKKLYDSVLLSGILTVTALSTKAPLSASMIQRYDEHREDLKOLKQFVKAS-LPEKYQEIFTDSSK | 357 |
| WP_017771984 | 279 | LLGQIGDEFADLFSAAKKLYDSVLLSGILTVIDLSTKAPLSASMIQRYDEHREDLKOLKQFVKAS-LPEKYQEIFADSSK | 357 |
| CFQ25032 | 279 | LLGQIGDEFADLFSAAKKLYDSVLLSGILTVIDLSTKASLSDSMIQRYDEHREDLKQLKQFVKAS-LPEKYQEIFADSSK | 357 |
| CFV16040 | 279 | LLGQIGDEFADLFSAAKKLYDSVLLSGILTVIDLSTKAPLSASMIQRYDEHREDLKOLKQFVKAS-LPEKYQEIFADSSK | 357 |
| KLJ37842 | 279 | LLGQIGDEFADLFSAAKKLYDSVLLSGILTVIDLSTKAPLSASMIQRYDEHREDLKOLKQFVKAS-LPEKYQEIFADSSK | 357 |
| KLJ72361 | 279 | LLGQIGDEFADLFSAAKKLYDSVLLSGILTVIDLSTKAPLSASMIQRYDEHREDLKOLKQFVKAS-LPEKYQEIFADSSK | 357 |
| KLL20707 | 279 | LLGQIGDEFADLFSAAKKLYDSVLLSGILTVIDLSTKAPLSASMIQRYDEHREDLKOLKQFVKAS-LPEKYQEIFADSSK | 357 |
| KLL42645 | 279 | LLGQIGDEFADLFSVAKKLYDSVLLSGILTVTDLSTKAPLSASMIQRYDEHREDLKQLKQFVKAS-LPEKYQEIFTDSSK | 357 |
| WP_047207273 | 279 | LLGQIGDEFADLFSAAKKLYDSVLLSGILTVIDLSTKAPLSASMIQRYDEHREDLKOLKQFVKAS-LPEKYQEIFADSSK | 357 |
| WP_047209694 | 279 | LLGQIGDEFADLFSAAKKLYDSVLLSGILTVTDLSTKAPLSASMIQRYDEHREDLKOLKQFVKAS-LPEKYQEIFADSSK | 357 |
| WP_050198062 | 279 | LLGQIGDEFADLFSAAKKLYDSVLLSGILTVIDLSTKAPLSASMIQRYDEHREDLKOLKQFVKAS-LPEKYQEIFADSSK | 357 |
| WP_050201642 | 279 | LLGQIGDEFADLFSAAKKLYDSVLLSGILTVIDLSTKAPLSASMIQRYDEHREDLKOLKQFVKAS-LPEKYQEIFADSSK | 357 |
| WP_050204027 | 279 | LLGQIGDEFADLFSVAKKLYDSVLLSGILTVTDLSTKAPLSASMIQRYDEHREDLKOLKQFVKAS-LPEKYQEIFTDSSK | 357 |
| WP_050881965 | 279 | LLGQIGDEFADLFSAAKKLYDSVLLSGILTVIDLSTKAPLSASMIQRYDEHREDLKOLKQFVKAS-LPEKYQEIFADSSK | 357 |
| WP_050886065 | 279 | LLGQIGDEFADLFSAAKKLYDSVLLSGILTVIDLSTKAPLSASMIQRYDEHREDLKOLKOFVKAS-LPEKYQEIFADSSK | 357 |
| AHN30376 | 279 | LLGQIGDEFADLFSAAKKLYDSVLLSGILTVTDLSTKAPLSASMIQRYDEHREDLKOLKQFVKAS-LPEKYQEIFADSSK | 357 |
| EAO78426 | 279 | LLGQIGDEFADLFSAAKKLYDSVLLSGILTVIDLSTKAPLSASMIQRYDEHREDLKOLKQFVKAS-LPEKYQEIFADSSK | 357 |
| CCW42055 | 279 | LLGQIGDEFADLFSAAKKLYDSVLLSGILTVTDLSTKAPLSASMIQRYDEHREDLKOLKQFVKAS-LPEKYQEIFADSSK | 357 |
| WP_003041502 | 278 | LLGEVGDEYADLFASAKNLYDAILLSGILTVDDNSTKAPLSASMVKRYEEHQKDLKKFEDFIKVN-ALDQYNAIFKDKNK | 356 |
| WP_037593752 | 279 | LLGEIGDEYADLFASAKNLYDAILLSGILAVDDNTTKAPLSASMVKRYEEHQKDLKKLKDFIKVN-APDQYNAIFKDKNK | 357 |
| WP_049516684 | 279 | LLGEIGDEYADLFASAKNLYDAILLSGILAVDDNTTKAPLSASMVKRYEEHQKDLKKLKDFIKVN-APAQYDDIFKDETK | 357 |
| GAD46167 | 278 | LLGEIGDEYADLFASAKNLYDAILLSGILAVDDNTTKAPLSASMVKRYEEHQKDLKKLKDFIKVN-APDQYNAIFKDKNK | 356 |
| WP_018363470 | 279 | LLGKIGDDYADLFTSSKNLYDAILLSGILTVDDNSTKAPLSASMIKRYVEHHEDLEKLKEFIKAN-KSELYHDIFKDKTQ | 357 |
| WP_003043819 | 278 | LLGQIGDQYADLFSAAKNLSDAILLSDILRSNSEVTKAPLSASMVKRYDEHHQDLALLKTLVRQQ-FPEKYAEIFKDDTK | 356 |
| WP_006269658 | 278 | FLGEVGDEYADLFASAKNLYDAILLSGILTVDDNSTKAPLSASMVKRYEEHQKDLKKLKDFIKVN-APDQYNAIFKDKNK | 356 |
| WP_048800889 | 278 | LLGKIGDDYADLFTSAKNLYDTILLSGILAVDDNSTKALLSASMIKRYEEHQKDLKKLKDFIKVN-APAQYDDIFKDETK | 356 |
| WP_012767106 | 278 | LLAQIGDQYADLFLAAKNLSDAILLSDILRVNSEITKAPLSASMIKRYDEHHODLTLLKALVROQ-LPEKYKEIFFDQSK | 356 |
| WP_014612333 | 278 | LLAQIGNQYADLFLAAKNLSDAILLSDILRVNSEITKAPLSASMIKRYDEHHQDLTLLKALVRQQ-LPEKYKEIFFDQSK | 356 |
| WP_015017095 | 278 | LLAQIGDQYADLFLAAKNLSDAILLSDILRVNSEITKAPLSASMIKRYDEHHODLTLLKALVROQ-LPEKYKEIFFDQSK | 356 |
| WP_015057649 | 278 | LLAQIGDQYADLFLAAKNLSDAILLSDILRVNSEITKAPLSASMIKRYDEHHODLTLLKALVRQQ-LPEKYKEIFFDQSK | 356 |
| WP_048327215 | 278 | LLAQIGDQYADLFLAAKNLSDAILLSDILRVNSEITKAPLSASMIKRYDEHHQDLTLLKALVRQQ-LPEKYKEIFFDQSK | 356 |
| WP_049519324 | 278 | LLAQIGDQYADLFLAAKNLSDAILLSDILRVNSEITKAPLSASMIKRYDEHHODLTLLKALVRQQ-LPEKYKEIFFDQSK | 356 |
| WP_012515931 | 278 | LLAQIGDQYADLFLAAKNLSDAILLSDILTESDEITRAPLSASMVKRYREHHKDLVTLKTLIKDQ-LPEKYQEIFLDKTK | 356 |
| WP_021320964 | 278 | LLAQIGDQYADLFLAAKNLSDAILLSDILTESDEITRAPLSASMVKRYREHHKDLVTLKTLIKDQ-LPEKYQEIFLDKTK | 356 |
| WP_037581760 | 278 | LLAQIGDQYADLFLAAKNLSDAILLSDILTESDEITRAPLSASMVKRYREHHKDLVTLKTLIKDQ-LPEKYQEIFLDKTK | 356 |
| WP_004232481 | 278 | LLGKIGDDYADLFTAAKNLYDAILLSGILTVDDNSTKAPLSASMIKRYEEHHEDLEKLKTFIKVN-NFDKYHEIFKDKSK | 356 |
| WP_009854540 | 279 | LLGKIGDDYADLFTSAKNLYDAILLSGILTVDDNSTKAPLSASMIKRYVEHHEDLEKLKEFIKAN-KSELYHDIFKDKNK | 357 |
| WP_012962174 | 279 | LIGKIGDEYADLFTSAKNLYDAILLSGILTVADNTTKAPLSASMIKRYNEHQVDLKKLKEFIKNN-ASDKYDEIFNDKDK | 357 |
| WP_039695303 | 279 | LLGKIGDDYADLFTSAKNLYDAILLSGILTVDDNSTKAPLSASMIKRYVEHHEDLEKLKEFIKAN-KSELYHDIFKDKNK | 357 |
| WP_014334983 | 278 | LLGKVGDDYADLFISAKNLYDAILLSGILTVDDNSTKAPLSASMIKRYVEHHEDLEKLKEFIKIN-KLKLYHDIFKDKTK | 356 |
| WP_003099269 | 278 | LLAQIGDQYADLFIAAKKLSDAILLSDIITVKGASTKAPLSASMVORYEEHQQDLALLKNLVKKQ-IPEKYKEIFDNKEK | 356 |
| AHY15608 | 278 | LLAQIGDQYADLFIAAKKLSDAILLSDIITVKGASTKAPLSASMVQRYEEHQQDLALLKNLVKKQ-IPEKYKEIFDNKEK | 356 |
| AHY17476 | 278 | LLAQIGDQYADLFIAAKKLSDAILLSDIITVKGASTKAPLSASMVQRYEEHQQDLALLKNLVKKQ-IPEKYKEIFDNKEK | 356 |
| ESR09100 | | -------------------------------------------------------------------------------- | |
| AGM98575 | 278 | LLAQIGDQYADLFIAAKKLSDAILLSDIITVKGASTKAPLSASMVQRYEEHQQDLALLKNLVKKQ-IPEKYKEIFDNKEK | 356 |
| ALF27331 | 278 | LLAQIEDNYAELFLSAKKLYDSILLSGILTVTDVSTKAPLSASMIQRYNEHQMDLAQLKOFIRQK-LSDKYNEVESDVSK | 356 |
| WP_018372492 | 276 | LLSKIDEEYAALFDLAKKVYDAVLLSNILTVKEKNTKAPLSASMIKRYEEHKDDLKAFKRFFRER-LPEKYETMFKDLTK | 354 |
| WP_045618028 | 279 | LLVQIGDDFADLFLVAKKLYDAILLSGILTVTDPSTKAPLSASMIDRYENHQKDLAALKOFIKTN-LPEKYDEVFSDQSK | 357 |
| WP_045635197 | 278 | LLGQIGDDFTDLFVSAKKLYDAILLSGILTVTDPSTKAPLSASMIERYENHONDLAALKQFIKNN-LPEKYDEVFSDQSK | 356 |
| WP_002263549 | 278 | LLAQIGDNYAELFLSAKKLYDSILLSGILTVTDVGTKAPLSASMIQRYNEHOMDLAQLKOFIRQK-LSDKYNEVESDVSK | 356 |
| WP_002263887 | 278 | LLAQIGDNYAELFLSAKKLYDSILLSGILTVTDVGTKAPLSASMIQRYNEHQMDLAQLKOFIRQK-LSDKYNEVESDVSK | 356 |
| WP_002264920 | 278 | LLGKIGDDYADLFTLAKNLYDAILLSGILTADDSSTKAPLSASMIKRYAEHHEDLEKLKEFIKAN-KPELYHDIFKDETK | 356 |
| WP_002269043 | 278 | LLAQIGDNYAELFLSAKKLYDSILLSGILTVTDVSTKAPLSASMIQRYNEHOMDLAQLKOFIRQK-LSDKYNEVESDVSK | 356 |
| WP_002269448 | 278 | LLAQIGDNYAELFLSAKKLYDSILLSGILTVTDVSTKAPLSASMIQRYNEHQMDLAQLKOFIRQK-LSDKYNEVFSDVSK | 356 |
| WP_002271977 | 278 | LLGKIGDDYADLFTLAKNLYDAILLSGILTADDSSTKAPLSASMIQRYNEHQMDLAQLKQFIRQK-LSDKYNEVFSDVSK | 356 |
| WP_002272766 | 278 | LLGKIGDDYADLFTLAKNLYDAILLSGILTADDSSTKAPLSASMIQRYNEHQMDLAQLKQFIRQK-LSDKYNEVESDVSK | 356 |
| WP_002273241 | 278 | LLAQIGDNYAELFLSAKKLYDSILLSGILTVTDVSTKAPLSASMIQRYNEHQMDLAQLKOFIRQK-LSDKYNEVESDVSK | 356 |
| WP_002275430 | 278 | LLTQIGDNYAELFLSAKKLYDSILLSGILTVTDVSTKAPLSASMIQRYNEHQMDLAQLKQFIRQK-LSDKYNEVESDVSK | 356 |
| WP_002276448 | 278 | LLAQIGDNYAELFLSAKKLYDSILLSGILTVTDVSTKAPLSASMIQRYNEHQMDLAQLKQFIRQK-LSDKYNEVESDVSK | 356 |
| WP_002277050 | 278 | LLGKIGDDYADLFTLAKNLYDAILLSGILTADDSSTKAPLSASMIKRYAEHHEDLEKLKEFIKAN-KPELYHDIFKDETK | 356 |
| WP_002277364 | 278 | LLAQIGDNYAELFLSAKKLYDSILLSGILTVTDVSTKAPLSASMIQRYNEHQMDLAQLKQFIRQK-LSDKYNEVESDVSK | 356 |
| WP_002279025 | 278 | LLAQIGDNYAELFLSAKKLYDSILLSGILTADDSSTKAPLSASMIQRYNEHOMDLAQLKQFIRQK-LSDKYNEVESDVSK | 356 |
| WP_002279859 | 278 | LLAQIGDNYAELFLSAKKLYDSILLSGILTVTDVSTKAPLSASMIQRYNEHOMDLAQLKQFIRQK-LSDKYNEVESDVSK | 356 |
| WP_002280230 | 278 | LLAQIGDNYAELFLSAKKLYDSILLSGILTVTDVSTKAPLSASMIQRYNEHOMDLAQLKOFIROK-LSDKYNEVFSDVSK | 356 |
| WP_002281696 | 278 | LLAQIGDNYAELFLSAKKLYDSILLSGILTVTDVSTKAPLSASMIQRYNEHOMDLAQLKOFIRQK-LSDKYNEVESDVSK | 356 |
| WP_002282247 | 278 | LLGKIGDDYADLFTLAKNLYDAILLSGILTADDSSTKAPLSASMIKRYAEHHEDLEKLKEFIKAN-KPELYHDIFKDETK | 356 |
| WP_002282906 | 278 | LLAQIGDNYAELFLSAKKLYDSILLSGILTVTDVGTKAPLSASMIQRYNEHQMDLAQLKQFIROK-LSDKYNEVESDVSK | 356 |
| WP_002283846 | 278 | LLAQIGDNYAELFLSAKKLYDSILLSGILTVTDVSTKAPLSASMIQRYNEHOMDLAQLKQFIRQK-LSDKYNEVESDVSK | 356 |
| WP_002287255 | 278 | LLAQIGDNYAELFLSAKKLYDSILLSGILTVTDVSTKAPLSASMIQRYNEHQMDLAQLKQFIRQK-LSDKYNEVESDVSK | 356 |
| WP_002288990 | 278 | LLAQIGDNYAELFLSAKKLYDSILLSGILTVTDVSTKAPLSASMIQRYNEHQMDLAQLKQFIRQK-LSDKYNEVESDVSK | 356 |
| WP_002289641 | 278 | LLAQIGDNYAELFLSAKKLYDSILLSGILTVTDVSTKAPLSASMIQRYNEHQMDLTOLKQFIROK-LSDKYNEVESDVSK | 356 |
| WP_002290427 | 278 | LLAQIGDNYAELFLSAKKLYDSILLSGILTVTDVSTKAPLSASMIQRYNEHOMDLAQLKOFIRQK-LSDKYNEVESDVSK | 356 |
| WP_002295753 | 278 | LLAQIGDNYAELFLSAKKLYDSILLSGILTVTDVSTKAPLSASMIQRYNEHOMDLAQLKQFIRQK-LSDKYNEVESDVSK | 356 |
| WP_002296423 | 278 | LLAQIGDNYAELFLSAKKLYDSILLSGILTVTDVSTKAPLSASMIQRYNEHOMDLAQLKQFIRQK-LSDKYNEVFSDVSK | 356 |
| WP_002304487 | 278 | LLGEIGDEYADLFASAKNLYDAILLSGILAVDDNTTKAPLSASMVKRYKEHKEELAAFKRFIKEK-LPKKYEEIFKDDTK | 356 |
| WP_002305844 | 278 | LLAQIGDNYAELFLSAKKLYDSILLSGILTVTDVSTKAPLSASMIQRYNEHQMDLAQLKQFIRQK-LSDKYNEVESDVSK | 356 |
| WP_002307203 | 278 | LLAQIGDNYAELFLSAKKLYDSILLSGILTVTDVSTKAPLSASMIQRYNEHOMDLAQLKOFIRQK-LSDKYNEVESDVSK | 356 |
| WP_002310390 | 278 | LLAQIGDNYAELFLSAKKLYDSILLSGILTVTDVSTKAPLSASMIQRYNEHQMDLAQLKOFIRQK-LSDKYNEVESDVSK | 356 |
| WP_002352408 | 278 | LLAQIGDNYAELFLSAKKLYDSILLSGILTVTDVSTKAPLSASMIQRYNEHQMDLAQLKQFIRQK-LSDKYNEVFSDVSK | 356 |
| WP_012997688 | 278 | LLAQIGDNYAELFLSAKKLYDSILLSGILTVTDVSTKAPLSASMIQRYNEHOMDLAQLKOFIRQK-LSDKYNEVFSDVSK | 356 |
| WP_014677909 | 278 | LLAQIGDNYAELFLSAKKLYDSILLSGILTVTDVSTKAPLSASMIQRYNEHQMDLAQLKQFIROK-LSDKYNEVFSDVSK | 356 |
| WP_019312892 | 278 | LLAQIGDNYAELFLSAKKLYDSILLSGILTVTDVSTKAPLSASMIQRYNEHQMDLAQLKQFIRQK-LSDKYNEVFSDVSK | 356 |
| WP_019313659 | 278 | LLAQIGDNYAELFLSAKKLYDSILLSGILTVTDVGTQAPLSASMIQRYNEHQMDLAQLKOFIRQK-LSDKYNEVESDVSK | 356 |
| WP_019314093 | 278 | LLAQIGDNYAELFLSAKKLYDSILLSGILTVTDVSTKAPLSASMIQRYNEHOMDLAQLKOFIRQK-LSDKYNEVESDVSK | 356 |
| WP_019315370 | 278 | LLAQIGDNYAELFLSAKKLYDSILLSGILTVTDVSTKAPLSASMIQRYNEHOMDLTOLKQFIRQK-LSDKYNEVESDVSK | 356 |
| WP_019803776 | 278 | LLAQIGDNYAELFLSAKKLYDSILLSGILTVTDVGTKAPLSASMIQRYNEHQMDLAQLKQFIRQK-LSDKYNEVESDVSK | 356 |
| WP_019805234 | 278 | LLAQIGDNYAELFLSAKKLYDSILLSGILTVTDVSTKAPLSASMIQRYNEHQMDLAQLKOFIRQK-LSDKYNEVESDVSK | 356 |
| WP_024783594 | 278 | LLAQIGDNYAELFLSAKKLYDSILLSGILTVTDVGTKAPLSASMIQRYNEHQMDLAQLKQFIRQK-LSDKYNEVFSDVSK | 356 |
| WP_024784288 | 278 | LLGKIGDDYADLFTLAKNLYDAILLSGILTADDSSTKAPLSASMIKRYAEHHEDLEKLKEFIKAN-KPELYHDIFKDETK | 356 |
| WP_024784666 | 278 | LLAQIGDNYAELFLSAKKLYDSILLSGILTVTDVSTKAPLSASMIQRYNEHOMDLVOLKOFIRQK-LSDKYNEVFSDVSK | 356 |
| WP_024784894 | 278 | LLAQIGDNYAELFLSAKKLYDSILLSGILTVTDVSTKAPLSASMIQRYNEHQMDLTOLKQFIRQK-LSDKYNEVESDVSK | 356 |
| WP_024786433 | 278 | LLGKIGDDYADLFTLAKNLYDAILLSGILTADDSSTKAPLSASMIKRYAEHHEDLEKLKEFIKAN-KPELYHDIFKDETK | 356 |
| WP_049473442 | 278 | LLGKIGDDYADLFTLAKNLYDAILLSGILTADDSSTKAPLSASMIQRYNEHQMDLAQLKQFIRQK-LSDKYNEVESDVSK | 356 |
| WP_049474547 | 278 | LLAQIGDNYAELFLSAKKLYDSILLSGILTVTDVSTKAPLSASMIQRYNEHQMDLTQLKOFIRQK-LSDKYNEVFSDVSK | 356 |
| EMC03581 | 271 | LLAQIGDNYAELFLSAKKLYDSILLSGILTVTDVSTKAPLSASMIQRYNEHQMDLAQLKQFIROK-LSDKYNEVESDVSK | 349 |
| WP_000428612 | 279 | LLGQIGDDFADLFVAAKKLYDAILLSGILTVTDPSTKAPLSASMIERYENHQKDLATLKQFIKTN-LPEKYDEVFSDQSK | 357 |
| WP_000428613 | 279 | LLGQIGDDFADLFLVAKKLYDAILLSGILTVTDPSTKAPLSASMIERYENHQKDLAVLKQFIKNN-LPEKYDEVFSDQSK | 357 |
| WP_049523028 | 278 | LLGQIGDVYADLFVVAKKLYDAILLAGILSVKDPGTKAPLSASMIERYDNHONDLSALKQFVRRN-LPEKYAEVFSDDSK | 356 |
| WP_003107102 | 247 | LLAQIGDQYADLFIAAKNLSDAILLSDILTVKGVNTKAPLSASMVQRFNEHQDDLKLLKKLVKVQ-LPEKYKEIFDIKDK | 325 |
| WP_054279288 | 280 | LLTQIGDEYADLFLSAKNLSDAILLSDILTVNGDGTQAPLSASLIKRYEEHRQDLALLKOMFKEQ-LPDLYRDVFTDENK | 358 |
| WP_049531101 | 279 | LLGQIGDDFADLFLVAKKLYDAILLSGILTVTDPSTKAPLSASMIERYENHQKDLAALKQFIKNN-LPEKYDEVFSDQSK | 357 |
| WP_049538452 | 279 | LLGQIGDGFADLFLVAKKLYDAILLSGILTVTDPSTKAPLSASMIERYQNHONDLASLKQFIKNN-LPEKYDEVFSDQSK | 357 |
| WP_049549711 | 279 | LLGQIGDDFADLFLVAKKLYDAILLSGILTVTDPSTKAPLSASMIERYENHQKDLTTLKQFIKNN-LPEKYDEVFSDQSK | 357 |
| WP_007896501 | 280 | LLAEIGDHYADLFLAAKNLSDAILLSDILTLSDENTRAPLSASMIKRYEEHQEDLALLKKLVKEQ-MPEKYWEIFSNAKK | 358 |
| EFR44625 | 232 | LLAEIGDHYADLFLAAKNLSDAILLSDILILSDENTRAPLSASMIKRYEEHQEDLALLKKLVKEQ-MPEKYWEIFSNAKK | 310 |
| WP_002897477 | 278 | LLGQIGDDFADLFLIAKKLYDAILLSGILTVTDPSTKAPLSASMIERYENHQKDLAALKQFIKNN-LPEKYVEVFSDQSK | 356 |
| WP_002906454 | 278 | LLGQIGDGFADLFLVAKKLYDAILLSGILTVTDPSTKAPLSASMIERYENHQEDLAALKQFIKNN-LSEKYAEVFSDQSK | 356 |
| WP_009729476 | 279 | LLGQIGDDFADLFLVAKKLYDAILLSGILTVINPSTKAPLSASMIERYENHQKDLASLKQFIKNN-LPEKYDEVFSDQSE | 357 |
| COR24647 | 278 | LLGIIGDEYADVFVAAKKVYDSILLSGILTTNNHSTKAPLSASMIDRYDEHNSDKKLLRDFIRTNIGKEVFKEVFYDTSK | 357 |
| WP_000066813 | 279 | LLGQIGDDFADLFLVAKKLYDAILLSGILTVKDLSTKAPLSASMIERYENHOKDLAALKOFIQNN-LQEKYDEVESDQSK | 357 |
| WP_009754323 | 279 | LLGQIGDDFADLFLVAKKLYDAILLSGILTVTDPSTKAPLSASMIERYENHQEDLAALKQFIKNN-LPEKYAEVFSDQSK | 357 |
| WP_044674937 | 278 | LLGKIGDDYADLFIATKSLYDGILLAGILSTTDSTTKAPLSSSMVNRYEEHKKDLALLKNFIHQN-LSDSYKEVENDKLK | 356 |
| WP_044676715 | 278 | LLGKIGDDYADLFIATKSLYDGILLAGILSTTDSTTKAPLSSSMVNRYEEHQKDLALLKNFIHQN-LSDSYKEVENDKLK | 356 |
| WP_044680361 | 278 | LLGKIGDDYADLFIATKSLYDGILLAGILSTTDSTTKAPLSSSMVNRYEEHQKDLALLKNFIHON-LSDSYKEVENDKLK | 356 |
| WP_044681799 | 278 | LLGKIGDDYADLFIATKSLYDGILLAGILSTTDSTTKAPLSSSMVNRYEEHKKDLALLKNFIHQN-LSDSYKEVENDKLK | 356 |
| WP_049533112 | 278 | LLGEIGDEYADLFASAKNLYDAILLSGILTVDDNSTKAPLSASMVKRYEEHQKDLKKLKDFIKVN-APDQYNAIFKDKNK | 356 |
| WP_029090905 | 244 | LADVLADEEYDLLLTAQKIYSAIILDESMDGYEYFA-----EAKKESYRKHQEELVLVKKMLKSNaITNDERAKF---EY | 315 |
| WP_006506696 | 284 | VEKDLGE-YVEFVDALHNVYSWVELQTIMGATHTD-NASISEAMVSRYNKIHDDLKLLKDCIKNN-VPNKYFDMERNDSE | 360 |
| AIT42264 | 278 | LLAQIGDQYADLFLAAKNLSDAILLSDILRVNTEITKAPLSASMIKRYDEHHQDLTLLKALVRQQ-LPEKYKEIFFDQSK | 356 |
| WP_034440723 | 284 | LLSNIDEGYRDVFLQAKNVYNAIELSKILKTDGKETKAPLSAQMVELYNQHREDLKKYKDYIKAY-LPEKYGETFKDATK | 362 |
| AKQ21048 | 278 | LLAQIGDQYADLFLAAKNLSDAILLSDILRVNTEITKAPLSASMIKRYDEHHQDLTLLKALVRQQ-LPEKYKEIFFDQSK | 356 |
| WP_004636532 | 277 | LLGMTDDVFLDVEMAAKNVYDAVEMSAIISTDTGNSKAVLSNQMINFYDEHKVDLAQLKOFFKTH-LPDKYYECFSDPSK | 355 |
| WP_002364836 | 284 | ILAKVGDEYSDVFLAAKNVYDAVELSTILADSDKKSHAKLSSSMIVRFTEHQEDLKKFKRFIREN-CPDEYDNLFKNEQK | 362 |
| WP_016631044 | 235 | ILAKVGDEYSDVFLAAKNVYDAVELSTILADSDKKSHAKLSSSMIVRFTEHQEDLKKEKRFIREN-CPDEYDNLFKNEQK | 313 |
| EMS75795 | 21 | LLEKSGEEFRDVFLQAKKVYDAILLSDILSTKKONSKAKLSLGMIERYDSHKKDLEELKQFVKAN-LPEKTAIFFKDSSK | 99 |
| WP_002373311 | 284 | ILAKVGDEYSDVFLAAKNVYDAVELSTILADSDKKSHAKLSSSMIVRFTEHQEDLKKFKRFIREN-CPDEYDNLFKNEQK | 362 |
| WP_002378009 | 284 | ILAKVGDEYSDVFLAAKNVYDAVELSTILADSDKKSHAKLSSSMIVRFTEHQEDLKNFKRFIREN-CPDEYDNLFKNEQK | 362 |
| WP_002407324 | 284 | ILAKVGDEYSDVFLAAKNVYDAVELSTILADSDKKSHAKLSSSMIVRFTEHQEDLKNFKRFIREN-CPDEYDNLFKNEQK | 362 |
| WP_002413717 | 284 | ILAKVGDEYSDVFLAAKNVYDAVELSTILADSDKKSHAKLSSSMIVRFTEHQEDLKKFKRFIREN-CPDEYDNLFKNEQK | 362 |
| WP_010775580 | 286 | ILAKVGDEYSDVFLAAKNVYDAVELSTILADSDKKSHAKLSSSMIVRFTEHQEDLKNFKRFIREN-CPDEYDNLFKNEQK | 364 |
| WP_010818269 | 284 | ILAKVGDEYSDVFLAAKNVYDAVELSTILADSDKKSHAKLSSSMIVRFTEHQEDLKKFKRFIREN-CPDEYDNLFKNEQK | 362 |
| WP_010824395 | 284 | ILAKVGDEYSDVFLAAKNVYDAVELSTILADSDKKSHAKLSSSMIVRFTEHQEDLKNFKRFIREN-CPDEYDNLFKNEQK | 362 |
| WP_016622645 | 284 | ILAKVGDEYSDVFLAAKNVYDAVELSTILADSDKKSYAKLSSSMIVRFTEHQEDLKKEKRFIREN-CPDEYDNLFKNEQK | 362 |
| WP_033624816 | 284 | ILAKVGDEYSDVFLAAKNVYDAVELSTILADSDKKSHAKLSSSMIVRFTEHQEDLKNFKRFIREN-CPDEYDNLFKNEQK | 362 |
| WP_033625576 | 284 | ILAKVGDEYSDVFLAAKNVYDAVELSTILADSDKKSHAKLSSSMIVRFTEHQEDLKKFKRFIREN-CPDEYDNLFKNEQK | 362 |
| WP_033789179 | 284 | ILAKVGDEYSDVFLAAKNVYDAVELSTILADSDKKSHAKLSSSMIVRFTEHQEDLKNFKRFIREN-CPDEYDNLFKNEQK | 362 |
| WP_002310644 | 282 | LLEKIGDDYIDLFVQAKNVYDAVLLSEILSDSTKNTRAKLSAGMIRRYDAHKEDLVLLKRFVKEN-LPKKYRAFFGDNSV | 360 |
| WP_002312694 | 283 | LLEKIGDDYIDLFVQAKNVYDAVLLSEILSDSTKNTRAKLSAGMIRRYDAHKEDLVLLKRFVKEN-LPKKYRAFFGDNSV | 361 |
| WP_002314015 | 283 | LLEKIGDDYIDLFVQAKNVYDAVLLSEILSDSTKNTRAKLSAGMIRRYDAHKEDLVLLKRFVKEN-LPKKYRAFFGDNSV | 361 |
| WP_002320716 | 283 | LLEKIGDDYIDLFVQAKNVYDAVLLSEILSDSTKNTRAKLSAGMIRRYDAHKEDLVLLKRFVKEN-LPKKYRAFFGDNSV | 361 |
| WP_002330729 | 282 | LLEKIGDDYIDLFVQAKNVYDAVLLSEILSDSTKNTRAKLSAGMIRRYDAHKEDLVLLKRFVKEN-LPKKYRAFFGDNSV | 360 |
| WP_002335161 | 283 | LLEKIGDDYIDLFVQAKNVYDAVLLSEILSDSTKNTRAKLSAGMIRRYDAHKEDLVLLKRFVKEN-LPKKYRAFFGDNSV | 361 |
| WP_002345439 | 283 | LLEKIGDDYIDLFVQAKNVYDAVLLSEILSDSTKNTRAKLSAGMIRRYDAHKEDLVLLKRFVKEN-LPKKYRAFFGDNSV | 361 |
| WP_034867970 | 276 | LLEKIGDEYLDIFLQAKKVHDAILLSEIISSTVKHTKAKLSSGMVERYERHKADLAKFKQFVKEN-VPQKATVFFKDTTK | 354 |
| WP_047937432 | 283 | LLEKIGDDYIDLFVQAKNVYDAVLLSEILSDSTKNTRAKLSAGMIRRYDAHKEDLVLLKRFVKEN-LPKKYRAFFGDNSV | 361 |
| WP_010720994 | 276 | LLEKIGDEYLDIFLQAKKVHDAILLSEIISSTVKHTQAKLSSGMVERYERHKADLAKFKQFVKEN-VPQKATVFFKDTTK | 354 |
| WP_010737004 | 276 | LLEKIGDEYLDIFLQAKKVHDAILLSEIISSTVKHTKAKLSSGMVERYERHKADLAKFKQFVKEN-VPQKATVFFKDTTK | 354 |
| WP_034700478 | 276 | LLEKIGDEYLDIFLQAKKVHDAILLSEIISSTVKHTQAKLSSGMVERYERHKADLAKFKQFVKEN-VPQKATVFFKDTTK | 354 |
| WP_007209003 | 281 | LLAIIGDEYGDIFVAAONLYQAILLAGILTSTEK-TRAKLSASMIQRYEEHAKDLKLLKRFVKEH-IPDKYAEIFNDATK | 358 |
| WP_023519017 | 276 | LLEKTSDDYAELFLKAKGVYDAILLSQILSKSDDETKAKLSANMKLRFEEHQRDLKOLKELVRRD-LPKKYDDFFKNRSK | 354 |
| WP_010770040 | 279 | LLAIIGDEYAEIFSATKSVYDAVALSGILSVTDGDTKAKLSASMVERYEAHQKDLVOFKQFIRKE-LPEMYAPIFRDNSV | 357 |
| WP_048604708 | 275 | LLGEIGDEYADVFEAAKNVYNAVELSGILTVTDNSTKAKLSASMIKRYEDHKTDLKLFKEFIRKN-LPEKYHEIFNDKNT | 353 |
| WP_010750235 | 276 | LLRKSNEEMIDVFLQVKKVYDAILLSDILSTKMKDTKAKLSAGMIERYQNHKKDLEELKOFVRAH-LHEKVTVFFKDSSK | 354 |
| AII16583 | 317 | LLAQIGDQYADLFLAAKNLSDAILLSDILRVNTEITKAPLSASMIKRYDEHHODLTLLKALVROQ-LPEKYKEIFFDQSK | 395 |
| WP_029073316 | 290 | KOPLLGD-CVEFIDLLHDIYSWVELQNILGSAHTS-EPSISAAMIQRYEDHKNDLKLLKDVIRKY-LPKKYFEVERDEKS | 366 |
| WP_031589969 | 290 | KQPLLGD-CVEFIDLLHDIYSWVELQNILGSAHTS-EPSISAAMIQRYEDHKNDLKLLKDVIRKY-LPKKYFEVERDEKS | 366 |
| KDA45870 | 276 | LLAEAGDQYLDIFVAAKKVYDAAILASILDVKDTQTKTVESQAMIERYEEHQKDLIELKRVFKKY-LPEKCHDFFSE-PK | 353 |
| WP_039099354 | 286 | LESSLDDNAHQIIESLQELYSGVLLAGIVPENQSLS-----QAMITKYDDHQKHLKMLKAVREAL-APEDRORLKQAYDQ | 359 |
| AKP02966 | 279 | LDSILDDDQFTVLDTANRIYSTITLNEIL-----NGESYFSMAKVNQYENHAIDLCKLRDMWHTT----KNEKAV-GLSR | 348 |
| WP_010991369 | 284 | LLALIGDEYAELFVAAKNAYSAVVLSSIITVAETETNAKLSASMIERFDTHEEDLGELKAFIKLH-LPKHYEEIFSNTEK | 362 |
| WP_033838504 | 284 | LLALIGDEYAELFVAAKNAYSAVVLSSIITVAETETNAKLSASMIERFDTHEEDLGELKAFIKLH-LPKHYEEIFSNTEK | 362 |
| EHN60060 | 287 | LLALIGDEYAELFVAAKNAYSAVVLSSIITVAETETNAKLSASMIERFDTHEEDLGELKAFIKLH-LPKHYEEIFSNTEK | 365 |
| EFR89594 | 53 | LLALIGDEYAELFVAAKNAYSAVVLSSIITVAETETNAKLSASMIERFDTHEEDLGELKAFIKLH-LPKHYEEIFSNTEK | 131 |
| WP_038409211 | 284 | LLAKIGDEYAEIFVAAKSTYNAVVLSNIITVTDTETKAKLSASMIERFDKHAKDLKRLKAFFKMQ-LPEKFNEVENDIEK | 362 |
| EFR95520 | | -------------------------------------------------------------------------------- | |
| WP_003723650 | 284 | LLAIIGDEYAELFVAAKNTYNAVVLSSIITVTDTETNAKLSASMIERFDAHEKDLVELKAFIKLN-LPKQYEEIFSNAAI | 362 |
| WP_003727705 | 284 | LLAIIGDEYAELFVAAKNTYNAVVLSSIITVTATETNAKLSASMIERFDAHEKELGELKAFIKLH-LPKQYQEIFNNAEI | 362 |
| WP_003730785 | 284 | LLAIIGDEYAELFVAAKNTYNAVVLSSIITVTATETNAKLSASMIERFDAHEKELGELKAFIKLH-LPKQYQEIFNNAEI | 362 |
| WP_003733029 | 284 | LLAIIGDEFAEVFVAAKNAYNAVVLSNIITVIDSTTRAKLSASLIERFENHKEDLKKMKRFVRTY-LPEKYDEIFDDTEK | 362 |
| WP_003739838 | 284 | LLAIIGDEYAELFVAAKNTYNAVVLSSIITVTDTETNAKLSASMIERFDAHEKDLSELKAFIKLH-LPKQYEEIFSNVAI | 362 |
| WP_014601172 | 284 | LLAIIGDEYAELFVAAKNTYNAVVLSSIITVTATETNAKLSASMIERFDAHEKDLGELKAFIKLH-LPKQYQEIFNNAAI | 362 |
| WP_023548323 | 284 | LLAIIGDEYAELFVAAKNTYNAVVLSSIITVTDTETNAKLSASMIERFDAHEKDLVELKAFIKLN-LPKQYEEIFSNAAI | 362 |
| WP_031665337 | 284 | LLAIIGDEYAELFVAAKNTYNAVVLSSIITVNDTETNAKLSASMIERFDAHEKDLVELKAFIKLN-LPKQYEEIFSNAAI | 362 |
| WP_031669209 | 284 | LLAIIGDEFAEVFVAAKNAYNAVVLSNIITVTDSTTRAKLSASLIERFENHKEDLKKMKRFVRTY-LPEKYDEIFDDTEK | 362 |
| WP_033920898 | 284 | LLAIIGDEYAELFVAAKNTYNAVVLSSIITVTDTETNAKLSASMIERFDAHEKDLVELKAFIKLN-LPKQYEEIFSNAAI | 362 |
| AKI42028 | 287 | LLAIIGDEYAELFVAAKNTYNAVVLSSIITVTATETNAKLSASMIERFDAHEKDLGELKAFIKLH-LPKQYQEIFNNAAI | 365 |
| AKI50529 | 287 | LLAIIGDEYAELFVAAKNTYNAVVLSSIITVTDTETNAKLSASMIERFDAHEKDLVELKAFIKLN-LPKQYEEIFSNAAI | 365 |
| EFR83390 | | -------------------------------------------------------------------------------- | |
| WP_046323366 | 284 | LLARVGDEYAEIFVAAKNAYNAVVLSSIITVSNTETKAKLSASMIERFDKHDKDLKRMKAFFKVR-LPENFNEVENDVEK | 362 |
| AKE81011 | 294 | LLAQIGDQYADLFLAAKNLSDAILLSDILRVNTEITKAPLSASMIKRYDEHHQDLTLLKALVRQQ-LPEKYKEIFFDQSK | 372 |
| CUO82355 | 288 | VENDLGE-YVEFIDSLHNIYSWVELQTIMGATHTD-NASISEAMVSRYNKIHEDLOLLKKCIKDN-VPKKYFDMFRNDSE | 364 |
| WP_033162887 | 289 | LQSELGE-YIEFIEMLHNIYSWVELQAILGATHTD-NPSISAAMVERYEEHKKDLRVLKKVIREE-LPDKYNEVERKDNR | 365 |
| AGZ01981 | 311 | LLAQIGDQYADLFLAAKNLSDAILLSDILRVNTEITKAPLSASMIKRYDEHHQDLTLLKALVRQQ-LPEKYKEIFFDQSK | 389 |
| AKA60242 | 278 | LLAQIGDQYADLFLAAKNLSDAILLSDILRVNTEITKAPLSASMIKRYDEHHQDLILLKALVRQQ-LPEKYKEIFFDQSK | 356 |
| AKS40380 | 278 | LLAQIGDQYADLFLAAKNLSDAILLSDILRVNTEITKAPLSASMIKRYDEHHQDLTLLKALVRQQ-LPEKYKEIFFDQSK | 356 |
| 4UN5_B | 282 | LLAQIGDQYADLFLAAKNLSDAILLSDILRVNTEITKAPLSASMIKRYDEHHQDLTLLKALVROQ-LPEKYKEIFFDQSK | 360 |
| WP_010922251 | 357 | [chemical structure] | 419 |
| WP_039695303 | 358 | --NGYAG YIEN G VKQDEFYKYLKNILSK-IkiDGSDYFL--DKIEREDFLRKORTFDNGSIPHQIHLQEM | 422 |
| WP_045635197 | 357 | --DGYAG YIDG K TTQETFYKYIKNLLSK-F--EGTDYFL--DKIEREDFLRKORTFDNGSIPHQIHLQEM | 419 |
| 5AXW_A | 169 | ------G SINR - ---------------K------TSDYVk----------------------------EA | 183 |
| WP_009880683 | 41 | --NGYAG YIDG G ASQEEFYKFIKPILEK-M--DGTEELLa--KLNREDLLRKORTFDNGSIPHQIHLGEL | 103 |
| WP_010922251 | 357 | --NGYAG YIDG G ASQEEFYKFIKPILEK-M--DGTEELLv--KLNREDLLRKORTFDNGSIPHQIHLGEL | 419 |
| WP_011054416 | 357 | --NGYAG YIDG G ASQEEFYKFIKPILEK-M--DGTEELLa--KLNREDLLRKORTFDNGSIPYQIHLGEL | 419 |
| WP_011284745 | 357 | --NGYAG YIDG G ASQEEFYKFIKPILEK-M--DGTEELLa--KLNREDLLRKORTFDNGSIPHQIHLGEL | 419 |
| WP_011285506 | 357 | --NGYAG YIDG G ASQEEFYKFIKPILEK-M--DGTEELLv--KLNREDLLRKORTFDNGSIPHQIHLGEL | 419 |
| WP_011527619 | 357 | --NGYAG YIDG G ASQEEFYKFIKPILEK-M--DGTEELLa--KLNREDLLRKORTFDNGSIPHQIHLGEL | 419 |
| WP_012560673 | 357 | --NGYAG YIDG G ASQEEFYKFIKPILEK-M--DGTEELLa--KLNREDLLRKORTFDNGSIPHQIHLGEL | 419 |
| WP_014407541 | 357 | --NGYAG YIDG G ASQEEFYKFIKPILEK-M--DGTEELLv--KLNREDLLRKORTEDNGSIPHQIHLGEL | 419 |
| WP_020905136 | 357 | --NGYAG YIDG G ASQEEFYKFIKPILEK-M--DGTEELLa--KLNREDLLRKORTFDNGSIPHQIHLGEL | 419 |
| WP_023080005 | 357 | --NGYAG YIDG G ASQEEFYKFIKPILEK-M--DGTEELLa--KLNREDLLRKORTFDNGSIPYQIHLGEL | 419 |
| WP_023610282 | 357 | --NGYAG YIDG G ASQEEFYKFIKPILEK-M--DGTEELLa--KLNREDLLRKORTFDNGSIPYQIHLGEL | 419 |
| WP_030125963 | 357 | --NGYAG YIDG G ASQEEFYKFIKPILEK-M--DGTEELLv--KLNREDLLRKORTEDNGSIPHOIHLGEL | 419 |
| WP_030126706 | 357 | --NGYAG YIDG G ASQEEFYKFIKPILEK-M--DGTEELLa--KLNREDLLRKORTEDNGSIPYQIHLGEL | 419 |
| WP_031488318 | 357 | --NGYAG YIDG G ASQEEFYKFIKPILEK-M--DGTEELLa--KLNREDLLRKORTFDNGSIPHQIHLGEL | 419 |
| WP_032460140 | 357 | --NGYAG YIDG G ASQEEFYKFIKPILEK-M--DGTEELLa--KLNREDLLRKORTFDNGSIPHQIHLGEL | 419 |
| WP_032461047 | 357 | --NGYAG YIDG G ASQEEFYKFIKPILEK-M--DGTEELLa--KLNREDLLRKORTFDNGSIPHQIHLGEL | 419 |
| WP_032462016 | 357 | --NGYAG YIDG G ASQEEFYKFIKPILEK-M--DGTEELLv--KLNREDLLRKORTFDNGSIPHQIHLGEL | 419 |
| WP_032462936 | 357 | --NGYAG YIDG G ASQEEFYKFIKPILEK-M--DGTEELLa--KLNREDLLRKORTFDNGSIPHQIHLGEL | 419 |
| WP_032464890 | 357 | --NGYAG YIDG G ASQEEFYKFIKPILEK-M--DGTEELLa--KLNRKDLLRKORTFDNGSIPHQIHLGEL | 419 |
| WP_033888930 | 182 | --NGYAG YIDG G ASQEEFYKFIKPILEK-M--DGTEELLv--KLNREDLLRKORTFDNGSIPHQIHLGEL | 244 |
| WP_038431314 | 357 | --NGYAG YIDG G ASQEEFYKFIKPILEK-M--DGTEELLa--KLNREDLLRKORTFDNGSIPHQIHLGEL | 419 |
| WP_038432938 | 357 | --NGYAG YIDG G ASQEEFYKFIKPILEK-M--DGTEELLa--KLNREDLLRKORTFDNGSIPYQIHLGEL | 419 |
| WP_038434062 | 357 | --NGYAG YIDG G ASQEEFYKFIKPILEK-M--DGTEELLa--KLNREDLLRKQRTFDNGSIPHQIHLGEL | 419 |
| BAQ51233 | 268 | --NGYAG YIDG G ASQEEFYKFIKPILEK-M--DGTEELLv--KLNREDLLRKORTFDNGSIPHQIHLGEL | 330 |
| KGE60162 | | ------- ---- - ---------------------------------------------------------- | |
| KGE60856 | | ------- ---- - ---------------------------------------------------------- | |
| WP_002989955 | 357 | --NGYAG YIDG G ASQEEFYKFIKPILEK-M--DGTEELLa--KLNREDLLRKORTFDNGSIPHQIHLGEL | 419 |
| WP_003030002 | 357 | --KGYAG YIEN G VKQDEFYKYLKGILLQ-I--NGSGDFL--DKIDREDFLRKORTFDNGSIPHQIHLQEM | 419 |
| WP_003065552 | 360 | --NGYAG YIEN G VKQDEFYKYLKNTLSK-Ia--GSDYFL--DKIEREDFLRKORTFDNGSIPHQIHLQEM | 422 |
| WP_001040076 | 358 | --DGYAG YIEG K TNQEAFYKYLSKLLTK-Q--EGSEYFL--EKIKNEDFLRKORTFDNGSIPHQVHLTEL | 420 |
| WP_001040078 | 358 | --DGYAG YIEG K TNQEAFYKYLSKLLTK-Q--EDSENFL--EKIKNEDFLRKORTFDNGSIPHQVHLTEL | 420 |
| WP_001040080 | 358 | --DGYAG YIEG K TNQEAFYKYLSKLLTK-Q--EDSENFL--EKIKNEDFLRKORTFDNGSIPHQVHLTEL | 420 |
| WP_001040081 | 358 | --DGYAG YIEG K TNQEAFYKYLSKLLTK-Q--EDSENFL--EKIKNEDFLRKORTFDNGSIPHQVHLTEL | 420 |
| WP_001040083 | 358 | --DGYAG YIEG K TNQEAFYKYLSKLLTK-Q--EDSENFL--EKIKNEDFLRKORTFDNGSIPHQVHLTEL | 420 |
| WP_001040085 | 358 | --DGYAG YIEG K TNQEAFYKYLSKLLTK-Q--EDSENFL--EKIKNEDFLRKORTFDNGSIPHQVHLTEL | 420 |
| WP_001040087 | 358 | --DGYAG YIEG K TNQEAFYKYLSKLLTK-Q--EDSENFL--EKIKNEDFLRKORTFDNGSIPHQVHLTEL | 420 |
| WP_001040088 | 358 | --DGYAG YIEG K TNQEAFYKYLSKLLTK-Q--EDSENFL--EKIKNEDFLRKORTFDNGSIPHQVHLTEL | 420 |
| WP_001040089 | 358 | --DGYAG YIEG K TNQEAFYKYLSKLLTK-Q--EDSENFL--EKIKNEDFLRKORTFDNGSIPHQVHLTEL | 420 |
| WP_001040090 | 358 | --DGYAG YIEG K TNQEAFYKYLSKLLTK-Q--EDSENFL--EKIKNEDFLRKORTFDNGSIPHQVHLTEL | 420 |
| WP_001040091 | 358 | --DGYAG YIEG K TNQEAFYKYLSKLLTK-Q--EDSENFL--EKIKNEDFLRKORTFDNGSIPHQVHLTEL | 420 |
| WP_001040092 | 358 | --DGYAG YIEG K TNQEAFYKYLSKLLTK-Q--EDSEYFL--EKIKNEDFLRKORTFDNGSIPHQVHLTEL | 420 |
| WP_001040094 | 358 | --DGYAG YIEG K TNQEAFYKYLSKLLTK-Q--EGSEYLL--EKIKNEDFLRKORTFDNGSIPHQVHLTEL | 420 |
| WP_001040095 | 358 | --DGYAG YIEG K TNQEAFYKYLSKLLTK-Q--EGSEYLL--EKIKNEDFLRKORTFDNGSIPHQVHLTEL | 420 |
| WP_001040096 | 358 | --DGYAG YIEG K TNQEAFYKYLSKLLTK-Q--EGSEYLL--EKIKNEDFLRKORTFDNGSIPHQVHLTEL | 420 |
| WP_001040097 | 358 | --DGYAG YIEG K TNQEAFYKYLSKLLTK-Q--EGSEYLL--EKIKNEDFLRKORTFDNGSIPHQVHLTEL | 420 |
| WP_001040098 | 358 | --DGYAG YIEG K TNQEAFYKYLSKLLTK-Q--EGSEYLL--EKIKNEDFLRKORTFDNGSIPHQVHLTEL | 420 |
| WP_001040099 | 358 | --DGYAG YIEG K TNQEAFYKYLSKLLTK-Q--EGSEYLL--EKIKNEDFLRKORTFDNGSIPHQVHLTEL | 420 |
| WP_001040100 | 358 | --DGYAG YIEG K TNQEAFYKYLSKLLTK-Q--EGSEYLL--EKIKNEDFLRKORTFDNGSIPHQVHLTEL | 420 |
| WP_001040104 | 358 | --DGYAG YIEG K TNQEAFYKYLSKLLTK-Q--EDSENFL--EKIKNEDFLRKORTFDNGSIPHQVHLTEL | 420 |
| WP_001040105 | 358 | --DGYAG YIEG K TNQEAFYKYLSKLLTK-Q--EDSENFL--EKIKNEDFLRKORTFDNGSIPHQVHLTEL | 420 |
| WP_001040106 | 358 | --DGYAG YIEG K TNQGAFYKYLSKLLTK-Q--EGSEYFL--EKIKNEDFLRKORTFDNGSIPHQVHLTEL | 420 |
| WP_001040107 | 358 | --DGYAG YIEG K TNQGAFYKYLSKLLTK-Q--EGSEYFL--EKIKNEDFLRKORTFDNGSIPHQVHLTEL | 420 |
| WP_001040108 | 358 | --DGYAG YIEG K TNQGAFYKYLSKLLTK-Q--EGSEYFL--EKIKNEDFLRKORTEDNGSIPHQVHLTEL | 420 |
| WP_001040109 | 358 | --DGYAG YIEG K TNQGAFYKYLSKLLTK-Q--EGSEYFL--EKIKNEDFLRKORTFDNGSIPHQVHLTEL | 420 |
| WP_001040110 | 358 | --DGYAG YIEG K TNQGAFYKYLSKLLTK-Q--EGSEYFL--EKIKNEDFLRKORTFDNGSIPHQVHLTEL | 420 |
| WP_015058523 | 358 | --DGYAG YIEG K TNQEAFYKYLSKLLTK-Q--EDSEYFL--EKIKNEDFLRKORTFDNGSIPHQVHLTEL | 420 |
| WP_017643650 | 358 | --DGYAG YIEG K TNQEAFYKYLSKLLTK-Q--EGSEYLL--EKIKNEDFLRKORTFDNGSIPHQVHLTEL | 420 |
| WP_017647151 | 358 | --DGYAG YIEG K TNQGAFYKYLSKLLTK-Q--EGSEYFL--EKIKNEDFLRKORTFDNGSIPHQVHLTEL | 420 |
| WP_017648376 | 358 | --DGYAG YIEG K TNQGAFYKYLSKLLTK-Q--EGSEYFL--EKIKNEDFLRKORTFDNGSIPHQVHLTEL | 420 |
| WP_017649527 | 358 | --DGYAG YIEG K TNQEAFYKYLSKLLTK-Q--EDSENFL--EKIKNEDFLRKORTFDNGSIPHQVHLTEL | 420 |
| WP_017771611 | 358 | --DGYAG YIEG K TNQGAFYKYLSKLLTK-Q--EGSEYFL--EKIKNEDFLRKORTFDNGSIPHQVHLTEL | 420 |
| WP_017771984 | 358 | --DGYAG YIEG K TNQEAFYKYLSKLLTK-Q--EDSENFL--EKIKNEDFLRKORTFDNGSIPHQVHLTEL | 420 |
| CFQ25032 | 358 | --DGYAG YIEG K TNQEAFYKYLSKLLTK-Q--EDSENFL--EKIKNEDFLRKORTFDNGSIPHQVHLTEL | 420 |
| CFV16040 | 358 | --DGYAG YIEG K TNQEAFYKYLSKLLTK-Q--EDSENFL--EKIKNEDFLRKORTFDNGSIPHQVHLTEL | 420 |
| KLJ37842 | 358 | --DGYAG YIEG K TNQEAFYKYLSKLLTK-Q--EDSENFL--EKIKNEDFLRKORTFDNGSIPHQVHLTEL | 420 |
| KLJ72361 | 358 | --DGYAG YIEG K TNQEAFYKYLSKLLTK-Q--EDSENFL--EKIKNEDFLRKORTFDNGSIPHQVHLTEL | 420 |
| KLL20707 | 358 | --DGYAG YIEG K TNQEAFYKYLSKLLTK-Q--EDSENFL--EKIKNEDFLRKORTFDNGSIPHQVHLTEL | 420 |
| KLL42645 | 358 | --DGYAG YIEG K TNQGAFYKYLSKLLTK-Q--EGSEYFL--EKIKNEDFLRKORTFDNGSIPHQVHLTEL | 420 |
| WP_047207273 | 358 | --DGYAG YIEG K TNQEAFYKYLSKLLTK-Q--EDSENFL--EKIKNEDFLRKORTEDNGSIPHQVHLTEL | 420 |
| WP_047209694 | 358 | --DGYAG YIEG K TNQEAFYKYLSKLLTK-Q--EGSEYLL--EKIKNEDFLRKORTFDNGSIPHQVHLTEL | 420 |
| WP_050198062 | 358 | --DGYAG YIEG K TNQEAFYKYLSKLLTK-Q--EDSENFL--EKIKNEDFLRKORTFDNGSIPHQVHLTEL | 420 |
| WP_050201642 | 358 | --DGYAG YIEG K TNQEAFYKYLSKLLTK-Q--EDSENFL--EKIKNEDFLRKORTFDNGSIPHQVHLTEL | 420 |
| WP_050204027 | 358 | --DGYAG YIES K TNQGAFYKYLSKLLTK-Q--EGSEYFL--EKIKNEDFLRKORTFDNGSIPHQVHLTEL | 420 |
| WP_050881965 | 358 | --DGYAG YIEG K TNQEAFYKYLSKLLTK-Q--EDSENFL--EKIKNEDFLRKORTFDNGSIPHQVHLTEL | 420 |
| WP_050886065 | 358 | --DGYAG YIEG K TNQEAFYKYLSKLLTK-Q--EDSENFL--EKIKNEDFLRKORTFDNGSIPHQVHLTEL | 420 |
| AHN30376 | 358 | --DGYAG YIEG K TNQEAFYKYLSKLLTK-Q--EDSEYFL--EKIKNEDFLRKORTFDNGSIPHQVHLTEL | 420 |
| EA078426 | 358 | --DGYAG YIEG K TNQEAFYKYLSKLLTK-Q--EDSENFL--EKIKNEDFLRKORTFDNGSIPHQVHLTEL | 420 |
| CCW42055 | 358 | --DGYAG YIEG K TNQEAFYKYLSKLLTK-Q--EGSEYLL--EKIKNEDFLRKORTEDNGSIPHQVHLTEL | 420 |
| WP_003041502 | 357 | --KGYAG YIES G VKQDEFYKYLKGILLQ-I--NGSGDFL--DKIDREDFLRKORTFDNGSIPHQIHLQEM | 419 |
| WP_037593752 | 358 | --KGYAG YIES G VEQDEFYKYLKGILLK-I--NGSGDFL--DKIDCEDFLRKORTFDNGSIPHQIHLQEM | 420 |
| WP_049516684 | 358 | --NGYAG YIEN G VKQDEFYKYLKNTLSK-I--DGSDYFL--DKIDREDFLRKORTFDNGSIPHQIHLQEM | 420 |
| GAD46167 | 357 | --KGYAG YIES G VEQDEFYKYLKGILLK-I--NGSGDFL--DKIDCEDFLRKORTFDNGSIPHQIHLQEM | 419 |
| WP_018363470 | 358 | --NGYAG YIEN G VKQDEFYKYLKGILTK-I--NGSDYFL--DKIEREDFLRKORTFDNGSIPHQIHLQEM | 420 |
| WP_003043819 | 357 | --NGYAG YVGI G ATQEEFYKFIKPILEK-M--DGAEELLa--KLNRDDLLRKORTFDNGSIPHQIHLKEL | 429 |
| WP_006269658 | 357 | --KGYAS YIES G VKQDEFYKYLKGILLK-I--NGSGDFL--DKIDREDFLRKORTFDNGSIPHQIHLQEM | 419 |
| WP_048800889 | 357 | --NGYAG YIEN G VKQDEFYKYLKNTLSK-I--DGSGYFL--DKIEREDFLRKORTFDNGSIPHQIHLQEM | 419 |
| WP_012767106 | 357 | --NGYAG YIDG G ASQEEFYKFIKPILEK-M--DGTEELLa--KLNREDLLRKORTFDNGSIPHQIHLGEL | 419 |
| WP_014612333 | 357 | --NGYAG YIDG G ASQEEFYKFIKPILEK-M--DGTEELLa--KLNREDLLRKORTFDNGSIPHQIHLGEL | 419 |
| WP_015017095 | 357 | --NGYAG YIDG G ASQEEFYKFIKPILEK-M--DGTEELLa--KLNREDLLRKORTFDNGSIPHQIHLGEL | 419 |
| WP_015057649 | 357 | --NGYAG YIDG G ASQEEFYKFIKPILEK-M--DGTEELLa--KLNREDLLRKORTFDNGSIPHQIHLGEL | 419 |
| WP_048327215 | 357 | --NGYAG YIDG G ASQEEFYKFIKPILEK-M--DGTEELLa--KLNREDLLRKORTFDNGSIPHQIHLGEL | 419 |
| WP_049519324 | 357 | --NGYAG YIDG G ASQEEFYKFIKPILEK-M--DGTEELLa--KLNREDLLRKORTFDNGSIPHQIHLGEL | 419 |
| WP_012515931 | 357 | --NGYAG YIEG Q VSQEEFYKYLKPILAR-L--DGSEPLL1--KIDREDFLRKORTFDNGSIPHQIHLEEL | 419 |
| WP_021320964 | 357 | --NGYAG YIEG 2 VSQEEFYKYLKPILAR-L--DGSEPLL1--KIDREDFLRKORTEDNGSIPHQIHLEEL | 419 |
| WP_037581760 | 357 | --NGYAG YIEG Q VSQEEFYKYLKPILAR-L--DGSEPLL1--KIDREDFLRKORTEDNGSIPHQIHLEEL | 419 |
| WP_004232481 | 357 | --NGYAG YIEN G VKQDIFYKHLKSIISE-K--NGGQYFL--DKIEREDFLRKORTFDNGSIPYQIHLQEM | 419 |
| WP_009854540 | 358 | --NGYAG YIEN G VKQDEFYKYLKNTLSK-I--DGSDYFL--DKIEREDFLRKORTFDNGSIPHQIHLQEM | 420 |
| WP_012962174 | 358 | --NGYAG YIEN G VKQDEFYKYLKTTLSK-I--DGSDYFL--DKIEREDFLRKORTFDNGSIPHQIHLQEM | 420 |
| WP_039695303 | 358 | --NGYAG YIEN G VKQDEFYKYLKNILSK-IkiDGSDYFL--DKIEREDFLRKORTFDNGSIPHQIHLQEM | 422 |
| WP_014334983 | 357 | --NGYAG YIDN G VKQDEFYKYLKTILTK-I--DDSDYFL--DKIERDDFLRKORTFDNGSIPHQIHLQEM | 419 |
| WP_003099269 | 357 | --NGYAG YIDG K TSQEEFYKYIKPILLK-L--DGTEKLIS--KLEREDFLRKORTEDNGSIPHQIHLNEL | 419 |
| AHY15608 | 357 | --NGYAG YIDG K TSQEEFYKYIKPILLK-L--DGTEKLIS--KLEREDFLRKORTFDNGSIPHQIHLNEL | 419 |
| AHY17476 | 357 | --NGYAG YIDG K TSQEEFYKYIKPILLK-L--DGTEKLIS--KLEREDFLRKORTFDNGSIPHQIHLNEL | 419 |
| ESR09100 | | ------- ---- - --------------------------------------------------------- | |
| AGM98575 | 357 | --NGYAG YIDG K TSQEEFYKYIKPILLK-L--DGTEKLIs--KLEREDFLRKORTFDNGSIPHQIHLNEL | 419 |
| ALF27331 | 357 | --DGYAG YIDG K TNQEAFYKYLKGLLNK-I--EGSGYFL--DKIEREDFLRKORTFDNGSIPHQIHLQEM | 419 |
| WP_018372492 | 355 | --PSYAA YVSG A VTEDDFYKFSKGLLID-V--EGAEYFL--EKIEREDFLRKORTFDNGAIPNQVHVKEL | 432 |
| WP_045618028 | 358 | --DGYAG YIDG K TTQEAFYKYIKNLLSK-L--EGADYFL--DKIEREDFLRKORTFDNGSIPHQIHLQEM | 420 |
| WP_045635197 | 357 | --DGYAG YIDG K TTQETFYKYIKNLLSK-F--EGTDYFL--DKIEREDFLRKORTFDNGSIPHQIHLQEM | 419 |
| WP_002263549 | 357 | --DGYAG YIDG K TNQEAFYKYLKGLLNK-I--EGSGYFL--DKIEREDFLRKORTFDNGSIPHQIHLQEM | 419 |
| WP_002263887 | 357 | --DGYAG YIDG K TNQEAFYKYLKGLLNK-I--EGSGYFL--DKIEREDFLRKORTFDNGSIPHQIHLQEM | 419 |
| WP_002264920 | 357 | --NGYAG YIEN G VKQDEFYKYLKNTLSK-I--AGSDYFL--DKIEREDFLRKORTFDNGSIPHQIHLQEM | 419 |
| WP_002269043 | 357 | --DGYAG YIDG K TNQEAFYKYLKGLLNK-I--EGSGYFL--DKIEREDFLRKORTFDNGSIPHQIHLQEM | 419 |
| WP_002269448 | 357 | --DGYAG YIDG K TNQEAFYKYLKGLLNK-I--EGSGYFL--DKIEREDFLRKORTFDNGSIPHQIHLQEM | 419 |
| WP_002271977 | 357 | --DGYAG YIDG K TNQEAFYKYLKGLLNK-I--EGSGYFL--DKIEREDFLRKQRTFDNGSIPHQIHLQEM | 419 |
| WP_002272766 | 357 | --DGYAG YIDG K TNQEAFYKYLKGLLNK-I--EGSGYFL--DKIEREDFLRKORTFDNGSIPHQIHLQEM | 419 |
| WP_002273241 | 357 | --DGYAG YIDG K TNQEAFYKYLKGLLNK-I--EGSGYFL--DKIEREDFLRKORTFDNGSIPHQIHLQEM | 419 |
| WP_002275430 | 357 | --DGYAG YIDG K TNQEAFYKYLKGLLNK-I--EGSGYFL--DKIEREDFLRKORTFDNGSIPHQIHLQEM | 419 |
| WP_002276448 | 357 | --DGYAG YIDG K TNQEAFYKYLKGLLNK-I--EGSGYFL--DKIEREDFLRKORTFDNGSIPHQIHLQEM | 419 |
| WP_002277050 | 357 | --NGYAG YIEN G VKQDEFYKYLKNTLSK-I--AGSDYFL--DKIEREDFLRKORTFDNGSIPHQIHLQEM | 419 |
| WP_002277364 | 357 | --DGYAG YIDG K TNQEAFYKYLKGLLNK-I--EGSGYFL--DKIEREDFLRKORTFDNGSIPHQIHLQEM | 419 |
| WP_002279025 | 357 | --DGYAG YIDG K TNQEAFYKYLKGLLNK-I--EGSGYFL--DKIEREDFLRKORTFDNGSIPHQIHLQEM | 419 |
| WP_002279859 | 357 | --DGYAG YIDG K TNQEAFYKYLKGLLNK-I--EGSGYFL--DKIEREDFLRKORTFDNGSIPHQIHLQEM | 419 |
| WP_002280230 | 357 | --DGYAG YIDG K TNQEAFYKYLKGLLNK-I--EGSGYFL--DKIEREDFLRKORTFDNGSIPHQIHLQEM | 419 |
| WP_002281696 | 357 | --DGYAG YIDG K TNQEAFYKYLKGLLNK-I--EGSGYFL--DKIEREDFLRKORTFDNGSIPHQIHLQEM | 419 |
| WP_002282247 | 357 | --NGYAG YIEN G VKQDEFYKYLKNTLSK-I--TGSDYFL--DQIEREDFLRKORTFDNGSIPHQIHLQEM | 419 |
| WP_002282906 | 357 | --DGYAG YIDG K TNQEAFYKYLKGLLNK-I--EGSGYFL--DKIEREDFLRKORTFDNGSIPHQIHLQEM | 419 |
| WP_002283846 | 357 | --DGYAG YIDG K TNQEAFYKYLKGLLNK-I--EGSGYFL--DKIEREDFLRKORTFDNGSIPHQIHLQEM | 419 |
| WP_002287255 | 357 | --DGYAG YIDG K TNQEAFYKYLKGLLNK-I--EGSGYFL--DKIEREDFLRKORTFDNGSIPHQIHLQEM | 419 |
| WP_002288990 | 357 | --DGYAG YIDG K TNQEAFYKYLKGLLNK-I--EGSGYFL--DKIEREDFLRKORTFDNGSIPHQIHLQEM | 419 |
| WP_002289641 | 357 | --DGYAG YIDG K TNQEAFYKYLKGLLNK-I--EGSGYFL--DKIEREDFLRKORTFDNGSIPHQIHLQEM | 419 |
| WP_002290427 | 357 | --DGYAG YIDG K TNQEAFYKYLKGLLNK-I--EGSGYFL--DKIEREDFLRKORTFDNGSIPHQIHLQEM | 419 |
| WP_002295753 | 357 | --DGYAG YIDG K TNQEAFYKYLKGLLNK-I--EGSGYFL--DKIEREDFLRKORTFDNGSIPHQIHLQEM | 419 |
| WP_002296423 | 357 | --DGYAG YIDG K TNQEAFYKYLKGLLNK-I--EGSGYFL--DKIEREDFLRKORTFDNGSIPHQIHLQEM | 419 |
| WP_002304487 | 357 | --NGYAG YVGA D ATEEEFYKYVKGILNK-V--EGADVWL--DKIDREDFLRKORTFDNGSIPHQIHLQEM | 429 |
| WP_002305844 | 357 | --DGYAG YIDG K TNQEAFYKYLKGLLNK-I--EGSGYFL--DKIEREDFLRKORTFDNGSIPHQIHLQEM | 419 |
| WP_002307203 | 357 | --DGYAG YIDG K TNQEAFYKYLKGLLNK-I--EGSGYFL--DKIEREDFLRKORTFDNGSIPHQIHLQEM | 419 |
| WP_002310390 | 357 | --DGYAG YIDG K TNQEAFYKYLKGLLNK-I--EGSGYFL--DKIEREDFLRKORTFDNGSIPHQIHLQEM | 419 |
| WP_002352408 | 357 | --DGYAG YIDG K TNQEAFYKYLKGLLNK-I--EGSGYFL--DKIEREDFLRKORTFDNGSIPHQIHLQEM | 419 |
| WP_012997688 | 357 | --DGYAG YIDG K TNQEAFYKYLKGLLNK-I--EGSGYFL--DKIEREDFLRKORTEDNGSIPHOIHLQEM | 419 |
| WP_014677909 | 357 | --DGYAG YIDG K TNQEAFYKYLKGLLNK-I--EGSGYFL--DKIEREDFLRKORTFDNGSIPHQIHLQEM | 419 |
| WP_019312892 | 357 | --DGYAG YIDG K TNQEAFYKYLKGLLNK-I--EGSGYFL--DKIEREDFLRKORTFDNGSIPHQIHLQEM | 419 |
| WP_019313659 | 357 | --DGYAG YIDG K TNQEAFYKYLKGLLNK-I--EGSGYFL--DKIEREDFLRKORTFDNGSIPHQIHLQEM | 419 |
| WP_019314093 | 357 | --DGYAG YIDG K TNQEAFYKYLKGLLNK-I--EGSGYFL--DKIEREDFLRKORTFDNGSIPHQIHLQEM | 419 |
| WP_019315370 | 357 | --DGYAG YIDG K TNQEAFYKYLKGLLNK-I--EGNGYFL--DKIEREDFLRKORTFDNGSIPHQIHLQEM | 419 |
| WP_019803776 | 357 | --DGYAG YIDG K TNQEAFYKYLKGLLNK-I--EGSGYFL--DKIEREDFLRKORTFDNGSIPHQIHLQEM | 419 |
| WP_019805234 | 357 | --DGYAG YIDG K TNQEAFYKYLKGLLNK-I--EGSGYFL--DKIEREDFLRKORTFDNGSIPHQIHLQEM | 419 |
| WP_024783594 | 357 | --DGYAG YIDG K TNQEAFYKYLKGLLNK-I--EGSGYFL--DKIEREDFLRKORTFDNGSIPHQIHLQEM | 419 |
| WP_024784288 | 357 | --NGYAG YIEN G VKQDEFYKYLKNTLSK-I--TGSDYFL--DQIEREDFLRKORTFDNGSIPHQIHLQEM | 419 |
| WP_024784666 | 357 | --DGYAG YIDG K TNQEAFYKYLKGLLNK-I--EGSGYFL--DKIEREDFLRKORTFDNGSIPHQIHLQEM | 419 |
| WP_024784894 | 357 | --DGYAG YIDG K TNQEAFYKYLKGLLNK-I--EGSGYFL--DKIEREDFLRKORTFDNGSIPHQIHLQEM | 419 |
| WP_024786433 | 357 | --NGYAG YIEN G VKQDEFYKYLKNTLSK-I--AGSDYFL--DKIEREDFLRKORTFDNGSIPHQIHLQEM | 419 |
| WP_049473442 | 357 | --DGYAG YIDG K TNQEAFYKYLKGLLNK-I--EGSGYFL--DKIEREDFLRKORTFDNGSIPHOIHLQEM | 419 |
| WP_049474547 | 357 | --DGYAG YIDG K TNQEAFYKYLKGLLNK-I--EGSGYFL--DKIEREDFLRKORTFDNGSIPHQIHLQEM | 419 |
| EMC03581 | 350 | --DGYAG YIDG K TNQEAFYKYLKGLLNK-I--EGSGYFL--DKIEREDFLRKORTFDNGSIPHOIHLQEM | 412 |
| WP_000428612 | 358 | --DGYAG YIDG K TTQESFYKYIKNLLSK-F--EGADYFL--EKIEREDFLRKORTFDNGSIPHQIHLQEM | 420 |
| WP_000428613 | 358 | --DGYAG YIDG K TTQEAFYKYIKNLLSK-F--EGTDYFL--EKIEREDFLRKORTFDNGSIPHQIHLQEM | 420 |
| WP_049523028 | 357 | --DGYAG YIDG K TTQEGFYKYIKNLISK-I--EGAEYFL--EKIEREDFLRKORTFDNGSIPHQIHLQEM | 419 |
| WP_003107102 | 326 | --NGYAG YING K TSQEDFYKYIKPILSK-L--KGAESLIs--KLEREDFLRKQRTFDNGSIPHQIHLNEL | 388 |
| WP_054279288 | 359 | --DGYAG YISG K TSQEAFYKYIKPILET-L--DGAEDFLt--KINREDFLRKORTFDNGSIPHQIHLGEL | 421 |
| WP_049531101 | 358 | --EGYAG YIDS K TTQEAFYKYIKNLLSK-I--DGADYLL--DKIEREDFLRKORTFDNGSIPHQIHLQEM | 420 |
| WP_049538452 | 358 | --DGYAG YVDG K TTQEAFYKYIKNLLSK-F--EGADYFL--EKIEREDFLRKORTFDNGSIPHQIHLQEM | 420 |
| WP_049549711 | 358 | --DGYAG YIDG K TTQEAFYKYIKNLLSK-F--EGTDYFL--EKIEREDFLRKORTFDNGSIPHQIHLQEM | 420 |
| WP_007896501 | 359 | --NGYAG YIEG K VSQEDFYRYIKPILSR-L--KGGDEFLa--KIDRDDFLRKORTFDNGSIPHQIHLKEL | 421 |
| EFR44625 | 311 | --NGYAG YIEG K VSQEDFYRYIKPILSR-L--KGGDEFLa--KIDRDDFLRKORTFDNGSIPHQIHLKEL | 373 |
| WP_002897477 | 357 | --DGYAG YIDG K TTQEAFYKYIKNLLSK-F--EGADYFL--DKIEREDFLRKORTFDNGSIPHQIHLQEM | 419 |
| WP_002906454 | 357 | --DGYAG FIDG K TTQEAFYKYIKNLLSK-L--EGADYFL--NKIEREDFLRKORTFDNGSIPHQIHLQEM | 419 |
| WP_009729476 | 358 | --DGYAG YIDG K TTQETFYKYIKNLLSK-F--EGADYFL--DKIEREDFLRKORTFDNGSIPHQIHLQEM | 420 |
| CQR24647 | 358 | --NGYAG YIDG K TNQEDFYKYLKNLLQK-V--DGGDYFI--EKIEREDFLRKORTFDNGSIPHQVHLDEM | 420 |
| WP_000066813 | 358 | --DGYAG YIDG K TTQEAFYKYIKNLLSK-F--EGADYFL--DKIEREDFLKKORTFDNGSIPHQIHLQEM | 420 |
| WP_009754323 | 358 | --DGYAG YIDG K TTQEAFYKYIKNLLSK-F--EGADYFL--DKIEREDFLRKORTEDNGSIPHQIHLQEM | 420 |
| WP_044674937 | 357 | --DGYAG YIEG K TTQENFYRFIKKAIEK-I--EGSDYFI--DKIDREDFLRKORTFDNGSIPHOIHLQEM | 419 |
| WP_044676715 | 357 | --DGYAG YIEG K TTQENFYRFIKKAIEK-I--EGSNYFI--DKIDREDFLRKORTFDNGSIPHQIHLQEM | 419 |
| WP_044680361 | 357 | --DGYAG YIEG K TTQENFYRFIKKAIEK-I--EGSNYFI--DKIDREDFLRKORTFDNGSIPHQIHLQEM | 419 |
| WP_044681799 | 357 | --DGYAG YIEG K TTQENFYRFIKKAIEK-I--EGSDYFI--DKIDREDFLRKORTFDNGSIPHQIHLQEM | 419 |
| WP_049533112 | 357 | --KGYAG YIEN G VKQDEFYKYLKGILLQ-I--NGSGDFL--DKIDREDFLRKORTFDNGSIPHQIHLQEM | 419 |
| WP_029090905 | 316 | fyTDYIG YEES K SKEERLFKHIELLLAKENVITTVEHALleKNITFASLLPLORSSRNAVIPYQVHEKEL | 403 |
| WP_006506696 | 361 | ksKGYYN YINR K APVDEFYKYVKKCIEK-VdtPEAKQILn--DIELENFLLKONSRINGSVPYQMQLDEM | 429 |
| AIT42264 | 357 | --NGYAG YIDG G ASQEEFYKFIKPILEK-M--DGTEELLv--KLNREDLLRKORTFDNGSIPHQIHLGEL | 419 |
| WP_034440723 | 363 | --NGYAG YIDG K TSQEDFYKFVKAQLKG---eENGEYFL--EAIENENFLRKORSFYNGVIPYQIHLQEL | 425 |
| AKQ21048 | 357 | --NGYAG YIDG G ASQEEFYKFIKPILEK-M--DGTEELLv--KLNREDLLRKORTFDNGSIPHQIHLGEL | 419 |
| WP_004636532 | 356 | --NGYAG YIDG K TNQEDFYKYIEKVMKT-IksDKKDYFL--DKIDREVFLRKORSFYNSVIPHQIHLQEM | 420 |
| WP_002364836 | 363 | --DGYAG YIAH A VSQLKFYQYVKKIIQD-I--AGAEYFL--EKIAQENFLRKORTFDNGVIPHQIHLAEL | 427 |
| WP_016631044 | 314 | --DGYAG YIAH A VSQLKFYQYVKKIIQD-I--AGAEYFL--EKIAQENFLRKORTFDNGVIPHQIHLAEL | 378 |
| EMS75795 | 100 | --NGYAG YIDG K TTQEDFYKFLKKELNG-I--AGSERFM--EKVDQENFLLKORTTANGVIPHQVHLTEL | 162 |
| WP_002373311 | 363 | --DGYAG YIAH A VSQLKFYQYVKKIIQD-I--AGAEYFL--EKIAQENFLRKORTFDNGVIPHQIHLAEL | 427 |
| WP_002378009 | 363 | --DGYAG YITH A VSQLKFYQYVKKIIQD-I--AGAEYFL--EKIAQENFLRKORTFDNGVIPHQIHLAEL | 427 |
| WP_002407324 | 363 | --DGYAG YITH A VSQLKFYQYVKKIIQD-I--AGAEYFL--EKIAQENFLRKORTFDNGVIPHQIHLAEL | 427 |
| WP_002413717 | 363 | --DGYAG YIAH A VSQLKFYQYVKKIIQD-I--AGAEYFL--EKIAQENFLRKORTFDNGVIPHQIHLAEL | 427 |
| WP_010775580 | 365 | --DGYAG YIAH A VSQLKFYQYVKKIIQD-I--AGAEYFL--EKIAQENFLRKORTFDNGVIPHQIHLAEL | 429 |
| WP_010818269 | 363 | --DGYAG YIAH A VSQLKFYQYVKKIIQD-I--AGAEYFL--EKIAQENFLRKORTFDNGVIPHQIHLAEL | 427 |
| WP_010824395 | 363 | --DGYAG YITH A VSQLKFYQYVKKIIQD-I--AGAEYFL--EKIAQENFLRKORTFDNGVIPHQIHLAEL | 427 |
| WP_016622645 | 363 | --DGYAG YIAH A VSQLKFYQYVKKIIQD-I--AGAEYFL--EKIAQENFLRKORTFDNGVIPHQIHLAEL | 427 |
| WP_033624816 | 363 | --DGYAG YIAH A VSQLKFYQYVKKIIQD-I--AGAEYFL--EKIAQENFLRKORTFDNGVIPHQIHLAEL | 427 |
| WP_033625576 | 363 | --DGYAG YIAH A VSQLKFYQYVKKIIQD-I--AGAEYFL--EKIAQENFLRKORTFDNGVIPHQIHLAEL | 427 |
| WP_033789179 | 363 | --DGYAG YIAH A VSQLKFYQYVKKIIQD-I--AGAEYFL--EKIAQENFLRKORTFDNGVIPHQIHLAEL | 427 |
| WP_002310644 | 361 | --NGYAG YIEG H ATQEDFYKFVKKELTG-I--RGSEVFL--TKIEQENFLRKORTFDNGVIPHQIHLTEL | 423 |
| WP_002312694 | 362 | --NGYAG YIEG H ATQEAFYKFVKKELTG-I--RGSEVFL--TKIEQENFLRKORTFDNGVIPHQIHLSEL | 424 |
| WP_002314015 | 362 | --NGYAG YIEG H ATQEDFYKFVKKELTG-I--RGSEVFL--TKIEQENFLRKORTFDNGVIPHQIHLTEL | 424 |
| WP_002320716 | 362 | --NGYAG YIEG H ATQEDFYKFVKKELTG-I--RGSEVFL--TKIEQENFLRKORTFDNGVIPHQIHLTEL | 424 |
| WP_002330729 | 361 | --NGYAG YIEG H ATQEDFYKFVKKELTG-I--RGSEVFL--TKIEQENFLRKORTFDNGVIPHQIHLTEL | 423 |
| WP_002335161 | 362 | --NGYAG YIEG H ATQEDFYKFVKKELTG-I--RGSEVFL--TKIEQENFLRKQRTFDNGVIPHQIHLTEL | 424 |
| WP_002345439 | 362 | --NGYAG YIEG H ATQEDFYKFVKKELTG-I--RGSEVFL--TKIEQENFLRKORTFDNGVIPHQIHLTEL | 424 |
| WP_034867970 | 355 | --NGYAG YIKG K TTQEEFYKFVKKELSG-V--VGSEPFL--EKIDQETFLLKORTYTNGVIPHQVHLIEL | 417 |
| WP_047937432 | 362 | --NGYAG YIEG H ATQEDFYKFVKKELTG-I--RGSEVFL--TKIEQENFLRKORTFDNGVIPHQIHLTEL | 424 |
| WP_010720994 | 355 | --NGYAG YIKG K TTQEEFYKFVKKELSG-V--VGSEPFL--EKIDQETFLLKORTYTNGVIPHQVHLIEL | 417 |
| WP_010737004 | 355 | --NGYAG YIKG K TTQEEFYKFVKKELSG-V--VGSEPFL--EKIDQETFLLKORTYTNGVIPHQVHLIEL | 417 |
| WP_034700478 | 355 | --NGYAG YIKG K TTQEEFYKFVKKELSG-V--VGSEPFL--EKIDQETFLLKORTYTNGVIPHQVHLIEL | 417 |
| WP_007209003 | 359 | --NGYAG YIDG K TKEEEFYKYLKTTLVQ---kSGYQYFI--EKIEQENFLRKORIYDNGVIPHQVHAEEL | 421 |
| WP_023519017 | 355 | --NGYAG YVKG K ATQEDFYKFLRTELAG-L--EESQSIM--EKIDLEIYLLKORTFANGVIPHQIHLVEM | 417 |
| WP_010770040 | 358 | --SGYAG YVEN S VTQAEFYKYIKKAIEK-V--PGAEYFL--EKIEQETFLDKORTENNGVIPHQIHLEEL | 422 |
| WP_048604708 | 354 | --DGYAG YIDN S TSQEKFYKYITNLIEK-I--DGAEYFL--KKIENEDFLRKORTFDNGIIPHQIHLEEL | 418 |
| WP_010750235 | 355 | --DGYAG YIDG K TTQADFYKFLKKELTG-V--PGSEPML--AKIDQENFLLKORTPINGVIPHQVHLTEF | 417 |
| AII16583 | 396 | --NGYAG YIDG G ASQEEFYKFIKPILEK-M--DGTEELLv--KLNREDLLRKORTEDNGSIPHQIHLGEL | 458 |
| WP_029073316 | 367 | kkNNYCN YINH K TPVDEFYKYIKKLIEK-IddPDVKTILn--KIELESFMLKONSRINGAVPYQMQLDEL | 435 |
| WP_031589969 | 367 | kkNNYCN YINH K TPVDEFYKYIKKLIEK-IddPDVKTILn--KIELESFMLKONSRINGAVPYQMQLDEL | 435 |
| KDA45870 | 354 | -iSGYAG YIDG K VSEEDFYKYTKKTLKG-I--PETEEILq--KIDANNYLRKORTFDNGAIPHQVHLKEL | 417 |
| WP_039099354 | 360 | ------- YVDG K -SKEDFYGDITKALKNnPdhPIVSEIKk--LIELDQFMPKORTKDNGAIPHQLHQQEL | 425 |
| AKP02966 | 349 | --QAYDD YINK K ---KELYTSLKKFLKVaLp-TNLAKEAe-EKISKGTYLVKPRNSENGVVPYQLNKIEM | 415 |
| WP_010991369 | 363 | --HGYAG YIDG - TKQADFYKYMKMTLEN-I--EGADYFI--AKIEKENFLRKORTFDNGAIPHOLHLEEL | 425 |
| WP_033838504 | 363 | --HGYAG YIDG - TKQADFYKYMKMTLEN-I--EGADYFI--AKIEKENFLRKORTFDNGAIPHOLHLEEL | 425 |
| EHN60060 | 366 | --HGYAG YIDG - TKQADFYKYMKMTLEN-I--EGADYFI--AKIEKENFLRKORTFDNGAIPHOLHLEEL | 428 |
| EFR89594 | 132 | --HGYAG YIDG - TKQADFYKYMKTTLEN-I--EGADYFI--AKIEKENFLRKORTFDNGAIPHOLHLEEL | 194 |
| WP_038409211 | 363 | --DGYAG YIDG - TTQEKFYKYMKKMLAN-I--DGADYFI--DQIEEENFLRKQRTFDNGTIPHQLHLEEL | 425 |
| EFR95520 | 1 | ------- ---- - ---------MKKMLAN-I--DGADYFI--DQIEEENFLRKORTFDNGTIPHQLHLEEL | 44 |
| WP_003723650 | 363 | --DGYAG YIDG - TKQVDFYKYLKTILEN-I--EGSDYFI--AKIEEENFLRKORTFDNGAIPHOLHLEEL | 425 |
| WP_003727705 | 363 | --DGYAG YIDG - TKQVDFYKYLKTTLEN-V--EGADYFI--TKIEEENFLRKORTFDNGVIPHQLHLEEL | 425 |
| WP_003730785 | 363 | --DGYAG YIDG - TKQVDFYKYLKTTLEN-V--EGADYFI--TKIEEENFLRKORTFDNGVIPHQLHLEEL | 425 |
| WP_003733029 | 363 | --HGYAG YISG - TKQADFYKYMKATLEK-I--EGADYFI--AKIEEENFLRKORTFDNGVIPHQLHLEEL | 425 |
| WP_003739838 | 363 | --DGYAG YIDG - TKQVDFYKYLKTLLEN-I--EGADYFI--AKIEEENFLRKORTEDNGAIPHOLHLEEL | 425 |
| WP_014601172 | 363 | --DGYAG YIDG - TKQVDFYKYLKTILEN-I--EGADYFI--AKIEEENFLRKORTFDNGAIPHOLHLEEL | 425 |
| WP_023548323 | 363 | --DGYAG YIDG - TKQVDFYKYLKTTLEN-V--EGADYFI--TKIEEENFLRKORTFDNGVIPHQLHLEEL | 425 |
| WP_031665337 | 363 | --DGYAG YIDG - TKQVDFYKYLKTILEN-I--EGSDYFI--AKIEEENFLRKORTFDNGAIPHOLHLEEL | 425 |
| WP_031669209 | 363 | --HGYAG YISG - TKQADFYKYMKATLEK-I--EGADYFI--AKIEEENFLRKORTFDNGVIPHOLHLEEL | 425 |
| WP_033920898 | 363 | --DGYAG YIDG - TKQVDFYKYLKTILEN-I--EGADYFI--AKIEEENFLRKORTFDNGAIPHOLHLEEL | 425 |
| AKI42028 | 366 | --DGYAG YIDG - TKQVDFYKYLKTILEN-I--EGADYFI--AKIEEENFLRKORTFDNGAIPHOLHLEEL | 428 |
| AKI50529 | 366 | --DGYAG YIDG - TKQVDFYKYLKTILEN-I--EGADYFI--AKIEEENFLRKORTFDNGAIPHOLHLEEL | 428 |
| EFR83390 | | ------- ---- - ---------------------------------------------------------- | |
| WP_046323366 | 363 | --DGYAG YIEG - TKQEAFYKYMKKMLEH-V--EGADYFI--NQIEEENFLRKORTEDNGAIPHOLHLEEL | 425 |
| AKE81011 | 373 | --NGYAG YIDG G ASQEEFYKFIKPILEK-M--DGTEELLv--KLNREDLLRKORTFDNGSIPHQIHLGEL | 435 |
| CUO82355 | 365 | kvKGYYN YINR K APVDEFYKFVKKCIEK-VdtPEAKQILh--DIELENFLLKONSRINGSVPYQMQLDEM | 433 |
| WP_033162887 | 366 | k1HNYLG YIKY D TPVEEFYKYIKGLLAK-VdtDEAREILe--RIDLEKFMLKONSRINGSIPYQMQKDEM | 434 |
| AGZ01981 | 390 | --NGYAG YIDG G ASQEEFYKFIKPILEK-M--DGTEELLv--KLNREDLLRKORTFDNGSIPHQIHLGEL | 452 |
| AKA60242 | 357 | --NGYAG YIDG G ASQEEFYKFIKPILEK-M--DGTEELLv--KLNREDLLRKORTFDNGSIPHQIHLGEL | 419 |
| AKS40380 | 357 | --NGYAG YIDG G ASQEEFYKFIKPILEK-M--DGTEELLv--KLNREDLLRKORTFDNGSIPHQIHLGEL | 419 |
| 4UN5_B | 361 | --NGYAG YIDG G ASQEEFYKFIKPILEK-M--DGTEELLv--KLNREDLLRKORTFDNGSIPHQIHLGEL | 423 |
| WP_010922251 | 420 | [chemical structure] | |
| WP_039695303 | 423 | HAILRRQGDYYPFLKE--KQD RIEKILTFRIPYYVGPL VRKD--SRFAWAEY---RSDEKITPWNEDKVIDKEK | 489 |
| WP_045635197 | 420 | NAILRRQGEYYPFLKD--NKE KIEKILTFRIPYYVGPL ARGN--RDFAWLTR---NSDEAIRPWNFEEIVDKAS | 486 |
| 5AXW_A | 184 | KQLLKVOKAYHOLDQSfi--D TYIDLLETRRTYYEGPG ---Eg-SPFGWKDI---------------------- | 229 |
| WP_009880683 | 104 | HAILRRQEDFYPFLKD--NRE KIEKILTFRIPYYVGPL ARG-n-SRFAWMTR---KSEETITPWNFEEVVDKGA | 170 |
| WP_010922251 | 420 | HAILRRQEDFYPFLKD--NRE KIEKILTFRIPYYVGPL ARG-n-SRFAWMTR---KSEETITPWNFEEVVDKGA | 486 |
| WP_011054416 | 420 | HAILRRQEDFYPFLKD--NRE KIEKILTFRIPYYVGPL ARG-n-SRFAWMTR---KSEETITPWNFEEVVDKGA | 486 |
| WP_011284745 | 420 | HAILRRQEDFYPFLKD--NRE KIEKILTFRIPYYVGPL ARG-n-SRFAWMTR---KSEETITPWNFEEVVDKGA | 486 |
| WP_011285506 | 420 | HAILRRQEDFYPFLKD--NRE KIEKILTFRIPYYVGPL ARG-n-SRFAWMTR---KSEETITPWNFEEVVDKGA | 486 |
| WP_011527619 | 420 | HAILRRQEDFYPFLKD--NRE KIEKILTFRIPYYVGPL ARG-n-SRFAWMTR---KSEETITPWNFEEVVDKGA | 486 |
| WP_012560673 | 420 | HAILRRQEDFYPFLKD--NRE KIEKILTFRIPYYVGPL ARG-n-SRFAWMTR---KSEETITPWNFEEVVDKGA | 486 |
| WP_014407541 | 420 | HAILRRQEDFYPFLKD--NRE KIEKILTFRIPYYVGPL ARG-n-SRFAWMTR---KSEETITPWNFEEVVDKGA | 486 |
| WP_020905136 | 420 | HAILRRQEDFYPFLKD--NRE KIEKILTFRIPYYVGPL ARG-n-SRFAWMTR---KSEETITPWNFEEVVDKGA | 486 |
| WP_023080005 | 420 | HAILRRQEDFYPFLKD--NRE KIEKILTFRIPYYVGPL ARG-n-SRFAWMTR---KSEETITPWNFEEVVDKGA | 486 |
| WP_023610282 | 420 | HAILRRQEDFYPFLKD--NRE KIEKILTFRIPYYVGPL ARG-n-SRFAWMTR---KSEETITPWNFEEVVDKGA | 486 |
| WP_030125963 | 420 | HAILRRQEDFYPFLKD--NRE KIEKILTFRIPYYVGPL ARG-n-SRFAWMTR---KSEETITPWNFEEVVDKGA | 486 |
| WP_030126706 | 420 | HAILRRQEDFYPFLKD--NRE KIEKILTFRIPYYVGPL ARG-n-SRFAWMTR---KSEETITPWNFEEVVDKGA | 486 |
| WP_031488318 | 420 | HAILRRQEDFYPFLKD--NRE KIEKILTFRIPYYVGPL ARG-n-SRFAWMTR---KSEETITPWNFEEVVDKGA | 486 |
| WP_032460140 | 420 | HAILRRQEDFYPFLKD--NRE KIEKILTFRIPYYVGPL ARG-n-SRFAWMTR---KSEETITPWNFEEVVDKGA | 486 |
| WP_032461047 | 420 | HAILRRQEDFYPFLKD--NRE KIEKILTFRIPYYVGPL ARG-n-SRFAWMTR---KSEETITPWNFEEVVDKGA | 486 |
| WP_032462016 | 420 | HAILRRQEDFYPFLKD--NRE KIEKILTFRIPYYVGPL ARG-n-SRFAWMTR---KSEETITPWNFEEVVDKGA | 486 |
| WP_032462936 | 420 | HAILRRQEDFYPFLKD--NRE KIEKILTFRIPYYVGPL ARG-n-SRFAWMTR---KSEETITPWNFEEVVDKGA | 486 |
| WP_032464890 | 420 | HAILRRQEDFYPFLKD--NRE KIEKILTFRIPYYVGPL ARG-n-SRFAWMTR---KSEETITPWNFEEVVDKGA | 486 |
| WP_033888930 | 245 | HAILRRQEDFYPFLKD--NRE KIEKILTFRIPYYVGPL ARG-n-SRFAWMTR---KSEETITPWNFEEVVDKGA | 311 |
| WP_038431314 | 420 | HAILRRQEDFYPFLKD--NRE KIEKILTFRIPYYVGPL ARG-n-SRFAWMTR---KSEETITPWNFEEVVDKGA | 486 |
| WP_038432938 | 420 | HAILRRQEDFYPFLKD--NRE KIEKILTFRIPYYVGPL ARG-n-SRFAWMTR---KSEETITPWNFEEVVDKGA | 486 |
| WP_038434062 | 420 | HAILRRQEDFYPFLKD--NRE KIEKILTFRIPYYVGPL ARG-n-SRFAWMTR---KSEETITPWNFEEVVDKGA | 486 |
| BAQ51233 | 331 | HAILRRQEDFYPFLKD--NRE KIEKILTFRIPYYVGPL ARG-n-SRFAWMTR---KSEETITPWNFEEVVDKGA | 397 |
| KGE60162 | | --------------------- ----------------- ------------------------------------ | |
| KGE60856 | | --------------------- ----------------- ------------------------------------ | |
| WP_002989955 | 420 | HAILRRQEDFYPFLKD--NRE KIEKILTFRIPYYVGPL ARG-n-SRFAWMTR---KSEETITPWNFEEVVDKGA | 486 |
| WP_003030002 | 420 | HAILRRQEEHYPFLKE--NQD KIEKILTFRIPYYVGPL ARKG--SRFAWAEY---KADEKITPWNEDDILDKEK | 486 |
| WP_003065552 | 423 | HAILRRQGDYYPFLKE--NQD RIEKILTFRIPYYVGPL ARKD--SRFSWAEY---HSDEKITPWNEDKVIDKEK | 489 |
| WP_001040076 | 421 | RAIIRRQSEYYPFLKE--NLD RIEKILTFRIPYYVGPL AREK--SDFAWMTR---KTDDSIRPWNFEDLVDKEK | 487 |
| WP_001040078 | 421 | KAIIRRQSEYYPFLKE--NQD RIEKILTFRIPYYIGPL AREK--SDFAWMTR---KTDDSIRPWNFEDLVDKEK | 487 |
| WP_001040080 | 421 | KAIIRRQSEYYPFLKE--NQD RIEKILTFRIPYYIGPL AREK--SDFAWMTR---KTDDSIRPWNFEDLVDKEK | 487 |
| WP_001040081 | 421 | KAIIRRQSEYYPFLKE--NQD RIEKILTFRIPYYIGPL AREK--SDFAWMTR---KTDDSIRPWNFEDLVDKEK | 487 |
| WP_001040083 | 421 | KAIIRRQSEYYPFLKE--NQD RIEKILTFRIPYYIGPL AREK--SDFAWMTR---KTDDSIRPWNFEDLVDKEK | 487 |
| WP_001040085 | 421 | KAIIRRQSEYYPFLKE--NQD RIEKILTFRIPYYIGPL AREK--SDFAWMTR---KTDDSIRPWNFEDLVDKEK | 487 |
| WP_001040087 | 421 | KAIIRRQSEYYPFLKE--NQD RIEKILTFRIPYYIGPL AREK--SDFAWMTR---KTDDSIRPWNFEDLVDKEK | 487 |
| WP_001040088 | 421 | KAIIRROSEYYPFLKE--NQD RIEKILTFRIPYYIGPL AREK--SDFAWMTR---KTDDSIRPWNFEDLVDKEK | 487 |
| WP_001040089 | 421 | KAIIRRQSEYYPFLKE--NQD RIEKILTFRIPYYIGPL AREK--SDFAWMTR---KTDDSIRPWNFEDLVDKEK | 487 |
| WP_001040090 | 421 | KAIIRRQSEYYPFLKE--NQD RIEKILTFRIPYYIGPL AREK--SDFAWMTR---KTDDSIRPWNFEDLVDKEK | 487 |
| WP_001040091 | 421 | KAIIRRQSEYYPFLKE--NQD RIEKILTFRIPYYIGPL AREK--SDFAWMTR---KTDDSIRPWNFEDLVDKEK | 487 |
| WP_001040092 | 421 | KAIIRRQSEYYPFLKE--NQD KIEKILTFRIPYYVGPL ARGN--SDFAWMTR---KTDDSIRPWNFEDLVDKEK | 487 |
| WP_001040094 | 421 | RAIIRROSEYYPFLKE--NLD RIEKILTFRIPYYVGPL AREK--SDFAWMTR---KTDDSIRPWNFEDLVDKEK | 487 |
| WP_001040095 | 421 | RAIIRRQSEYYPFLKE--NLD RIEKILTFRIPYYVGPL AREK--SDFAWMTR---KTDDSIRPWNFEDLVDKEK | 487 |
| WP_001040096 | 421 | RAIIRRQSEYYPFLKE--NLD RIEKILTFRIPYYVGPL AREK--SDFAWMTR---KTDDSIRPWNFEDLVDKEK | 487 |
| WP_001040097 | 421 | RAIIRRQSEYYPFLKE--NLD RIEKILTFRIPYYVGPL AREK--SDFAWMTR---KTDDSIRPWNFEDLVDKEK | 487 |
| WP_001040098 | 421 | RAIIRRQSEYYPFLKE--NLD RIEKILTFRIPYYVGPL AREK--SDFAWMTR---KTDDSIRPWNFEDLVDKEK | 487 |
| WP_001040099 | 421 | RAIIRRQSEYYPFLKE--NLD RIEKILTFRIPYYVGPL AREK--SDFAWMTR---KTDDSIRPWNFEDLVDKEK | 487 |
| WP_001040100 | 421 | RAIIRRQSEYYPLLKE--NLD RIEKILTFRIPYYVGPL AREK--SDFAWMTR---KTDDSIRPWNFEDLVDKEK | 487 |
| WP_001040104 | 421 | KAIIRROSEYYPFLKE--NQD RIEKILTFRIPYYIGPL AREK--SDFAWMTR---KTDDSIRPWNFEDLVDKEK | 487 |
| WP_001040105 | 421 | KAIIRROSEYYPFLKE--NQD RIEKILTFRIPYYIGPL AREK--SDFAWMTR---KTDDSIRPWNFEDLVDKEK | 487 |
| WP_001040106 | 421 | KAIIRROSEYYPFLKE--NLD RIEKILTFRIPYYVGPL AREK--SDFAWMTR---KTDDSIRPWNFEELVDKEA | 487 |
| WP_001040107 | 421 | KAIIRROSEYYPFLKE--NLD RIEKILTFRIPYYVGPL AREK--SDFAWMTR---KTDDSIRPWNFEELVDKEA | 487 |
| WP_001040108 | 421 | KAIIRROSEYYPFLKE--NLD RIEKILTFRIPYYVGPL AREK--SDFAWMTR---KTDDSIRPWNFEELVDKEA | 487 |
| WP_001040109 | 421 | KAIIRROSEYYPFLKE--NLD RIEKILTFRIPYYVGPL AREK--SDFAWMTR---KTDDSIRPWNFEELVDKEA | 487 |
| WP_001040110 | 421 | KAIIRROSEYYPFLKE--NLD RIEKILTFRIPYYVGPL AREK--SDFAWMTR---KTDDSIRPWNFEELVDKEA | 487 |
| WP_015058523 | 421 | KAIIRROSEYYPFLKE--NQD KIEKILTFRIPYYVGPL ARGN--SDFAWMTR---KTDDSIRPWNFEDLVDKEK | 487 |
| WP_017643650 | 421 | RAIIRROSEYYPFLKE--NLD RIEKILTFRIPYYVGPL AREK--SDFAWMTR---KTDDSIRPWNFEDLVDKEK | 487 |
| WP_017647151 | 421 | KAIIRRQSEYYPFLKE--NLD RIEKILTFRIPYYVGPL AREK--SDFAWMTR---KTDDSIRPWNFEELVDKEA | 487 |
| WP_017648376 | 421 | KAIIRROSEYYPFLKE--NLD RIEKILTFRIPYYVGPL AREK--SDFAWMTR---KTDDSIRPWNFEELVDKEA | 487 |
| WP_017649527 | 421 | KAIIRRQSEYYPFLKE--NQD RIEKILTFRIPYYIGPL AREK--SDFAWMTR---KTDDSIRPWNFEDLVDKEK | 487 |
| WP_017771611 | 421 | KAIIRROSEYYPFLKE--NLD RIEKILTFRIPYYVGPL AREK--SDFAWMTR---KTDDSIRPWNFEELVDKEA | 487 |
| WP_017771984 | 421 | KAIIRROSEYYPFLKE--NQD RIEKILTFRIPYYIGPL AREK--SDFAWMTR---KTDDSIRPWNFEDLVDKEK | 487 |
| CFQ25032 | 421 | KAIIRRQSEYYPFLKE--NQD RIEKILTFRIPYYIGPL AREK--SDFAWMTR---KTDDSIRPWNFEDLVDKEK | 487 |
| CFV16040 | 421 | KAIIRRQSEYYPFLKE--NQD RIEKILTFRIPYYIGPL AREK--SDFAWMTR---KTDDSIRPWNFEDLVDKEK | 487 |
| KLJ37842 | 421 | KAIIRRQSEYYPFLKE--NQD RIEKILTFRIPYYIGPL AREK--SDFAWMTR---KTDDSIRPWNFEDLVDKEK | 487 |
| KLJ72361 | 421 | KAIIRRQSEYYPFLKE--NQD RIEKILTFRIPYYIGPL AREK--SDFAWMTR---KTDDSIRPWNFEDLVDKEK | 487 |
| KLL20707 | 421 | KAIIRRQSEYYPFLKE--NQD RIEKILTFRIPYYIGPL AREK--SDFAWMTR---KTDDSIRPWNFEDLVDKEK | 487 |
| KLL42645 | 421 | KAIIRRQSEYYPFLKE--NLD RIEKILTFRIPYYVGPL AREK--SDFAWMTR---KTDDSIRPWNFEELVDKEA | 487 |
| WP_047207273 | 421 | KAIIRROSEYYPFLKE--NQD RIEKILTFRIPYYIGPL AREK--SDFAWMTR---KIDDSIRPWNFEDLVDKEK | 487 |
| WP_047209694 | 421 | RAIIRRQSEYYPFLKE--NLD RIEKILTFRIPYYVGPL AREK--SDFAWMTR---KIDDSIRPWNFEDLVDKEK | 487 |
| WP_050198062 | 421 | KAIIRROSEYYPFLKE--NQD RIEKILTFRIPYYIGPL AREK--SDFAWMTR---KIDDSIRPWNFEDLVDKEK | 487 |
| WP_050201642 | 421 | KAIIRRQSEYYPFLKE--NQD RIEKILTFRIPYYIGPL AREK--SDFAWMTR---KTDDSIRPWNFEDLVDKEK | 487 |
| WP_050204027 | 421 | KAIIRRQSEYYPFLKE--NLD RIEKILTFRIPYYVGPL AREK--SDFAWMTR---KIDDSIRPWNFEELVDKEA | 487 |
| WP_050881965 | 421 | KAIIRROSEYYPFLKE--NQD RIEKILTFRIPYYIGPL AREK--SDFAWMTR---KTDDSIRPWNFEDLVDKEK | 487 |
| WP_050886065 | 421 | KDIIRRQSEYYPFLKE--NQD RIEKILTFRIPYYIGPL AREK--SDFAWMTR---KTDDSIRPWNFEDLVDKEK | 487 |
| AHN30376 | 421 | KAIIRRQSEYYPFLKE--NQD KIEKILTFRIPYYVGPL ARGN--SDFAWMTR---KTDDSIRPWNFEDLVDKEK | 487 |
| EAO78426 | 421 | KAIIRRQSEYYPFLKE--NQD RIEKILTFRIPYYIGPL AREK--SDFAWMTR---KTDDSIRPWNFEDLVDKEK | 487 |
| CCW42055 | 421 | RAIIRROSEYYPFLKE--NLD RIEKILTFRIPYYVGPL AREK--SDFAWMTR---KTDDSIRPWNFEELVDKEA | 487 |
| WP_003041502 | 420 | HAILRRQGEHYPFLKE--NQD KIEKILTFRIPYYVGPL ARKG--SRFAWAEY---KADEKITPWNEDDILDKEK | 486 |
| WP_037593752 | 421 | HAILRRQGEHYPFLKE--NQD KIEKILTFRIPYYVGPL ARKG--SRFAWAEY---KADEKITPWNEDDILDKEK | 487 |
| WP_049516684 | 421 | HAILRRQGEHYPFLKE--NQD KIEKILTFRIPYYVGPL ARKG--SRFAWAEY---KADEKITPWNEDDILDKEK | 487 |
| GAD46167 | 420 | HAILRRQGEHYPFLKE--NQD KIEKILTFRIPYYVGPL ARKG--SRFAWAEY---KADEKITPWNEDDILDKEK | 486 |
| WP_018363470 | 421 | HAILRRQGDYYPFLKE--NQE EIEKILTFRIPYYVGPL ARKD--SRFAWAEY---RSDEKITPWNEDKVIDKEK | 487 |
| WP_003043819 | 430 | HAILRRQEEFYPFLKE--NRE KIEKILTFRIPYYVGPL ARG-n-SRFAWLTR---KSEEAITPWNFEEVVDKGA | 496 |
| WP_006269658 | 420 | HAILRRQGEHYPFLKE--NQD KIEKILTFRIPYYVGPL ARKG--SRFAWAEY---KADEKITPWNEDDILDKEK | 486 |
| WP_048800889 | 420 | HAILRRQGEHYPFLKE--NQD KIEKILTFRIPYYVGPL VRKG--SRFAWAEY---KADEKITPWNEDDILDKEK | 486 |
| WP_012767106 | 420 | HAILRRQEDFYPFLKD--NRE KIEKILTFRIPYYVGPL ARG-n-SRFAWMTR---KSEETITPWNFEEVVDKGA | 486 |
| WP_014612333 | 420 | HAILRRQEDFYPFLKD--NRE KIEKILTFRIPYYVGPL ARG-n-SRFAWMTR---KSEETITPWNFEEVVDKGA | 486 |
| WP_015017095 | 420 | HAILRRQEDFYPFLKD--NRE KIEKILTFRIPYYVGPL ARG-n-SRFAWMTR---KSEETITPWNFEEVVDKGA | 486 |
| WP_015057649 | 420 | HAILRRQEDFYPFLKD--NRE KIEKILTFRIPYYVGPL ARG-n-SRFAWMTR---KSEETITPWNFEEVVDKGA | 486 |
| WP_048327215 | 420 | HAILRRQEDFYPFLKD--NRE KIEKILTFRIPYYVGPL ARG-n-SRFAWMTR---KSEETITPWNFEEVVDKGA | 486 |
| WP_049519324 | 420 | HAILRRQEDFYPFLKD--NRE KIEKILTFRIPYYVGPL ARG-n-SRFAWMTR---KSEETITPWNFEEVVDKGA | 486 |
| WP_012515931 | 420 | HAILRRQEVFYPFLKD--NRK KIESLLTFRIPYYVGPL ARG-h-SRFAWVKR---KFDGAIRPWNFEEIVDEEA | 486 |
| WP_021320964 | 420 | HAILRRQEVFYPFLKD--NRK KIESLLTFRIPYYVGPL ARG-h-SRFAWVKR---KFDGAIRPWNFEEIVDEEA | 486 |
| WP_037581760 | 420 | HAILRRQEVFYPFLKD--NRK KIESLLTFRIPYYVGPL ARG-h-SRFAWVKR---KFDGAIRPWNFEEIVDEEA | 486 |
| WP_004232481 | 420 | RTILRRQGEYYPFLKE--NQA KIEKILTFRIPYYVGPL ARKN--SRFAWAKY---HSDEPITPWNFDEVVDKEK | 486 |
| WP_009854540 | 421 | HAILRRQGDYYPFLKE--KQD RIEKILTFRIPYYVGPL VRKD--SRFAWAEY---RSDEKITPWNFDKVIDKEK | 487 |
| WP_012962174 | 421 | HAILRRQGEHYAFLKE--NQA KIEKILTFRIPYYVGPL ARKN--SRFAWAEY---HSDEKITPWNFDEIIDKEK | 487 |
| WP_039695303 | 423 | HAILRRQGDYYPFLKE--KOD RIEKILTFRIPYYVGPL VRKD--SRFAWAEY---RSDEKITPWNEDKVIDKEK | 489 |
| WP_014334983 | 420 | HSILRRQGDYYPFLKE--NQA KIEKILTFRIPYYVGPL ARKD--SRFAWANY---HSDEPITPWNFDEVVDKEK | 486 |
| WP_003099269 | 420 | KAIIRRQEKFYPFLKE--NQK KIEKLFTFKIPYYVGPL ANG-q-SSFAWLKR---QSNESITPWNFEEVVDQEA | 486 |
| AHY15608 | 420 | KAIIRRQEKFYPFLKE--NQK KIEKLFTFKIPYYVGPL ANG-q-SSFAWLKR---QSNESITPWNFEEVVDQEA | 486 |
| AHY17476 | 420 | KAIIRRQEKFYPFLKE--NQK KIEKLFTFKIPYYVGPL ANG-q-SSFAWLKR---QSNESITPWNFEEVVDQEA | 486 |
| ESR09100 | | --------------------- ----------------- ------------------------------------ | |
| AGM98575 | 420 | KAIIRRQEKFYPFLKE--NQK KIEKLFTFKIPYYVGPL ANG-q-SSFAWLKR---QSNESITPWNFEEVVDQEA | 486 |
| ALF27331 | 420 | RAIIRRQAEFYPFLAD--NQD RIEKILTFRIPYYIGPL ARGK--SDFSWLSR---KSADKITPWNFDEIVDKES | 486 |
| WP_018372492 | 433 | QAIILNQSKYYPFLAE--NKE KIEKILTFRIPYYVGPL ARGN--SSFAWLQR---KSDEAIRPWNFEQVVDMET | 499 |
| WP_045618028 | 421 | NAIIRRQGEHYPFLQE--NKE KIEKILTFRIPYYVGPL ARGN--RDFAWLTR---NSDQAIRPWNFEEIVDKAR | 487 |
| WP_045635197 | 420 | NAILRRQGEYYPFLKD--NKE KIEKILTFRIPYYVGPL ARGN--RDFAWLTR---NSDEAIRPWNFEEIVDKAS | 486 |
| WP_002263549 | 420 | RAIIRRQAEFYPFLAD--NQD RIEKLLTFRIPYYVGPL ARGK--SDFAWLSR---KSADKITPWNFDEIVDKES | 486 |
| WP_002263887 | 420 | RAIIRRQAEFYPFLAD--NQD RIEKLLTFRIPYYVGPL ARGK--SDFAWLSR---KSADKITPWNFDEIVDKES | 486 |
| WP_002264920 | 420 | HAILRRQGDYYPFLKE--NQD RIEKILTFRIPYYVGPL ARGK--SDFAWLSR---KSADKITPWNFDEIVDKES | 486 |
| WP_002269043 | 420 | RAIIRRQAEFYPFLAD--NQD RIEKILTFRIPYYVGPL ARGK--SDFAWLSR---KSADKITPWNFDEIVDKES | 486 |
| WP_002269448 | 420 | RAIIRRQAEFYPFLAD--NQD RIEKILTFRIPYYVGPL ARGK--SDFAWLSR---KSADKITPWNFDEIVDKES | 486 |
| WP_002271977 | 420 | RAIIRRQAEFYPFLAD--NQD RIEKILTFRIPYYVGPL ARGK--SDFAWLSR---KSADKITPWNFDEIVDKES | 486 |
| WP_002272766 | 420 | RAIIRRQAEFYPFLAD--NQD RIEKILTFRIPYYVGPL ARGK--SDFAWLSR---KSADKITPWNFDEIVDKES | 486 |
| WP_002273241 | 420 | RAIIRRQAEFYPFLAD--NQD RIEKILTFRIPYYVGPL ARGK--SDFAWLSR---KSADKITPWNFDEIVDKES | 486 |
| WP_002275430 | 420 | RAIIRRQAEFYPFLAD--NQD RIEKILTFRIPYYVGPL ARGK--SDFAWLSR---KSADKITPWNFDEIVDKES | 486 |
| WP_002276448 | 420 | RAIIRRQAEFYPFLAD--NQD RIEKILTFRIPYYVGPL ARGK--SDFAWLSR---KSADKITPWNFDEIVDKES | 486 |
| WP_002277050 | 420 | HAILRRQGDYYPFLKE--NQD RIEKILTFRIPYYVGPL ARKN--SRFAWAEY---HSDEAVMPWNEDQVIDKES | 486 |
| WP_002277364 | 420 | RAIIRRQAEFYPFLAD--NQD RIEKILTFRIPYYVGPL ARGK--SDFAWLSR---KSADKITPWNFDEIVDKES | 486 |
| WP_002279025 | 420 | RAIIRRQSEFYPFLAD--NQD RIEKILTFRIPYYVGPL ARGK--SDFAWLSR---KSADKITPWNFDEIVDKES | 486 |
| WP_002279859 | 420 | RAIIRRQAEFYPFLAD--NQD RIEKILTFRIPYYVGPL ARGK--SDFAWLSR---KSADKITPWNFDEIVDKES | 486 |
| WP_002280230 | 420 | RAIIRRQAEFYPFLAD--NQD RIEKILTFRIPYYVGPL ARGK--SDFAWLSR---KSADKITPWNFDEIVDKES | 486 |
| WP_002281696 | 420 | RAIIRRQAEFYPFLAD--NQD RIEKILTFRIPYYVGPL ARGK--SDFAWLSR---KSADKITPWNFDEIVDKES | 486 |
| WP_002282247 | 420 | HAILRRQGDYYPFLKE--NQD RIEKILTFRIPYYVGPL ARKN--SRFAWAEY---HSDEAVTPWNFDQVIDKES | 486 |
| WP_002282906 | 420 | RAIIRRQAEFYPFLAD--NQD RIEKLLTFRIPYYVGPL ARGK--SDFAWLSR---KSADKITPWNFDEIVDKES | 486 |
| WP_002283846 | 420 | RAIIRRQAEFYPFLAD--NQD RIEKILTFRIPYYVGPL ARGK--SDFAWLSR---KSADKITPWNFDEIVDKES | 486 |
| WP_002287255 | 420 | RAIIRRQAEFYPFLAD--NQD RIEKILTFRIPYYVGPL ARGK--SDFAWLSR---KSADKITPWNFDEIVDKES | 486 |
| WP_002288990 | 420 | RAIIRRQAEFYPFLAD--NQD RIEKILTFRIPYYVGPL ARGK--SDFAWLSR---KSADKITPWNFDEIVDKES | 486 |
| WP_002289641 | 420 | RAIIRRQAEFYPFLAD--NQD RIEKLLTFRIPYYVGPL ASGK--SDFAWLSR---KSADKITPWNFDEIVDKES | 486 |
| WP_002290427 | 420 | RAIIRRQAEFYPFLAD--NQD RIEKILTFRIPYYVGPL ARGK--SDFAWLSR---KSADKITPWNFDEIVDKES | 486 |
| WP_002295753 | 420 | RAIIRRQAEFYPFLAD--NQD RIEKILTFRIPYYVGPL ARGK--SDFAWLSR---KSADKITPWNFDEIVDKES | 486 |
| WP_002296423 | 420 | RAIIRRQAEFYPFLAD--NQD RIEKILTFRIPYYVGPL ARGK--SDFAWLSR---KSADKITPWNFDEIVDKES | 486 |
| WP_002304487 | 430 | HAILRRQGEHYPFLKE--NQD KIEKILTFRIPYYVGPL VRKG--SRFAWAEY---KADEKITPWNEDDILDKEK | 496 |
| WP_002305844 | 420 | RAIIRRQAEFYPFLAD--NQD RIEKILTFRIPYYVGPL ARGK--SDFAWLSR---KSADKITPWNFDEIVDKES | 486 |
| WP_002307203 | 420 | RAIIRRQAEFYPFLAD--NQD RIEKILTFRIPYYVGPL ARGK--SDFAWLSR---KSADKITPWNFDEIVDKES | 486 |
| WP_002310390 | 420 | RAIIRRQAEFYPFLAD--NQD RIEKILTFRIPYYVGPL ARGK--SDFAWLSR---KSADKITPWNFDEIVDKES | 486 |
| WP_002352408 | 420 | RAIIRRQAEFYPFLAD--NQD RIEKILTFRIPYYVGPL ARGK--SDFAWLSR---KSADKITPWNFDEIVDKES | 486 |
| WP_012997688 | 420 | RAIIRRQAEFYPFLAD--NQD RIEKILTFRIPYYVGPL ARGK--SDFAWLSR---KSADKITPWNFDEIVDKES | 486 |
| WP_014677909 | 420 | RAIIRRQAEFYPFLAD--NQD RIEKILTFRIPYYVGPL ARGK--SDFAWLSR---KSADKITPWNFDEIVDKES | 486 |
| WP_019312892 | 420 | RAIIRRQAEFYPFLAD--NQD RIEKILTFRIPYYVGPL ARGK--SDFAWLSR---KSADKITPWNFDEIVDKES | 486 |
| WP_019313659 | 420 | RAIIRRQAEFYPFLAD--NQD RIEKLLTFRIPYYVGPL ARGK--SDFAWLSR---KSADKITPWNFDEIVDKES | 486 |
| WP_019314093 | 420 | RAIIRRQAEFYPFLAD--NQD RIEKILTFRIPYYVGPL ARGK--SDFAWLSR---KSADKITPWNFDEIVDKES | 486 |
| WP_019315370 | 420 | RAIIRRQAEFYPFLAD--NQD RIEKILTFRIPYYVGPL ARGK--SDFAWLSR---KSADKITPWNFDEIVDKES | 486 |
| WP_019803776 | 420 | RAIIRRQAEFYPFLAD--NQD RIEKLLTFRIPYYVGPL ARGK--SDFAWLSR---KSADKITPWNFDEIVDKES | 486 |
| WP_019805234 | 420 | RAIIRRQAEFYPFLAD--NQD RIEKILTFRIPYYVGPL ARGK--SDFAWLSR---KSADKITPWNFDEIVDKES | 486 |
| WP_024783594 | 420 | RAIIRRQAEFYPFLAD--NQD RIEKLLTFRIPYYVGPL ARGK--SDFAWLSR---KSADKITPWNFDEIVDKES | 486 |
| WP_024784288 | 420 | HAILRRQGDYYPFLKE--NQD RIEKILTFRIPYYVGPL ARKN--SRFAWAEY---HSDEAVTPWNEDQVIDKES | 486 |
| WP_024784666 | 420 | RAIIRRQAEFYPFLAD--NQD RIEKILTFRIPYYVGPL ARGK--SDFAWLSR---KSADKITPWNFDEIVDKES | 486 |
| WP_024784894 | 420 | RAIIRRQAEFYPFLAD--NQD RIEKLLTFRIPYYVGPL ASGK--SDFAWLSR---KSADKITPWNFDEIVDKES | 486 |
| WP_024786433 | 420 | HAILRRQGDYYPFLKE--NQD RIEKILTFRIPYYVGPL ARKN--SRFAWAEY---HSDEAVTPWNFDQVIDKES | 486 |
| WP_049473442 | 420 | RAIIRRQAEFYPFLAD--NQD RIEKILTFRIPYYVGPL ARGK--SDFAWLSR---KSADKITPWNFDEIVDKES | 486 |
| WP_049474547 | 420 | RAIIRRQAEFYPFLAD--NQD RIEKLLTFRIPYYVGPL ASGK--SDFAWLSR---KSADKITPWNFDEIVDKES | 486 |
| EMC03581 | 413 | RAIIRRQAEFYPFLAD--NQD RIEKILTFRIPYYVGPL ARGK--SDFAWLSR---KSADKITPWNFDEIVDKES | 479 |
| WP_000428612 | 421 | NAILRRQGEHYPFLKE--NKE KIEKILTFRIPYYVGPL ARGN--RDFAWLTR---NSDQAIRPWNFEEIVDKAS | 487 |
| WP_000428613 | 421 | NAILRRQGEHYPFLKD--NKE KIEKILTFRIPYYVGPL ARGN--RDFAWLTR---NSDEAIRPWNFEEIVDKAS | 487 |
| WP_049523028 | 420 | NAILRHQGEYYPFLKE--NKD KIEQILTFRIPYYVGPL ARGN--SDFAWLSR---NSDEAIRPWNFEEMVDKSS | 486 |
| WP_003107102 | 389 | KSIIRRQEKYYPFLKD--KQV RIEKIFTFRIPYFVGPL ANG-n-SSFAWVKR---RSNESITPWNFEEVVEQEA | 455 |
| WP_054279288 | 422 | QAILERQQAYYPFLKD--NQE KIEKILTFRIPYYIGPL ARG-n-SRFAWLTR---TSDQKITPWNFDEMVDQEA | 488 |
| WP_049531101 | 421 | NAILRRQGEHYPFLKE--NRE KIEKILTFRIPYYVGPL ARGN--RDFAWLTR---NSDQAIRPWNFEEIVDKAS | 487 |
| WP_049538452 | 421 | NAILRRQGEHYPFLKE--NKE KIEKILTFRIPYYVGPL ARGN--RDFAWLTR---NSDQAIRPWNFEEIVDKAS | 487 |
| WP_049549711 | 421 | NAILRRQGEHYPFLKE--NKE KIEKILTFRIPYYVGPL ARGN--RDFAWLTR---NSDQAIRPWNFEEIVDKAS | 487 |
| WP_007896501 | 422 | HAILRRQEKYYPFLAE--QKE KIEQLLCFRIPYYVGPL AKGGn-SSFAWLKR---RSDEPITPWNFKDVVDEEA | 489 |
| EFR44625 | 374 | HAILRRQEKYYPFLAE--QKE KIEQLLCFRIPYYVGPL AKGGn-SSFAWLKR---RSDEPITPWNFKDVVDEEA | 441 |
| WP_002897477 | 420 | NAILRRQGEHYPFLKE--NRE KIEKILTFRIPYYVGPL ARDN--RDFSWLTR---NSDEPIRPWNFEEVVDKAR | 486 |
| WP_002906454 | 420 | NAILRRQGEHYLFLKE--NRE KIEKILAFRIPYYVGPL ARGN--RDFAWLTR---NSDQAIRPWNFEEVVDKAS | 486 |
| WP_009729476 | 421 | NAILRRQGEHYPFLKE--NKE KIEKILTFRIPYYVGPL ARGN--RDFAWLTR---NSDQAIRPWNFEEIVDKAS | 487 |
| CQR24647 | 421 | KAILRRQGEFYPFLKE--NAE KIQQILTFKIPYYVGPL ARGN--SRFAWASY---NSNEKMTPWNEDNVIDKTS | 487 |
| WP_000066813 | 421 | NAIIRRQGEHYPFLQE--NKE KIEKILTFRIPYYVGPL ARGN--GDFAWLTR---NSDQAIRPWNFEEIVDQAS | 487 |
| WP_009754323 | 421 | NAILRRQGEHYPLLKE--NKE KIEKILTFRIPYYVGPL ARGN--RDFAWLTR---NSDQAIRPWNFEEIVDKAS | 487 |
| WP_044674937 | 420 | HAIIRRQAEFYPFLVE--NQD KIEKILTFRIPYYVGPL ARGK--SEFAWLNR---KSDEKIRPWNFDEMVDKET | 486 |
| WP_044676715 | 420 | HAIIRRQAEFYPFLVE--NQD KIEKILTFRIPYYVGPL ARGK--SEFAWLNR---KSDEKIRPWNFDEMVDKET | 486 |
| WP_044680361 | 420 | HAIIRRQAEFYPFLVE--NQD KIEKILTFRIPYYVGPL ARGK--SEFAWLNR---KSDEKIRPWNFDEMVDKET | 486 |
| WP_044681799 | 420 | HAIIRRQAEFYPFLVE--NQD KIEKILTFRIPYYVGPL ARGK--SEFAWLNR---KSDEKIRPWNFDEMVDKET | 486 |
| WP_049533112 | 420 | HAILRRQEEHYPFLKE--NQD KIEKILTFRIPYYVGPL ARKG--SRFAWAEY---KADEKITPWNEDDILDKEK | 486 |
| WP_029090905 | 404 | VAILENQATYYPFLLE--QKD NIHKLLTFRIPYYVGPL ADQKd-SEFAWMVR---KQAGKITPFNFEEMVDIDA | 471 |
| WP_006506696 | 430 | IKIIDNQAEYYPILKE--KRE QLLSILTFRIPYYFGPL ETSEh----AWIKRlegKENQRILPWNYQDIVDVDA | 498 |
| AIT42264 | 420 | HAILRRQEDFYPFLKD--NRE KIEKILTFRIPYYVGPL ARG-n-SRFAWMTR---KSEETITPWNFEEVVDKGA | 486 |
| WP_034440723 | 426 | TAVLDQQEKHYSFLKE--NRD KIISLLTFRIPYYVGPL AKGE--SRFAWLER--sNSEEKIKPWNEDKIVDIDK | 493 |
| AKQ21048 | 420 | HAILRRQEDFYPFLKD--NRE KIEKILTFRIPYYVGPL ARG-n-SRFAWMTR---KSEETITPWNFEEVVDKGA | 486 |
| WP_004636532 | 421 | QAILDRQSQYYPFLAE--NRD KIESLVTFRIPYYVGPL TVSDq-SEFAWMER---QSDEPIRPWNEDEIVNKER | 488 |
| WP_002364836 | 428 | QAIIHRQAAYYPFLKE--NQE KIEQLVTFRIPYYVGPL SKGDa-STFAWLKR---QSEEPIRPWNLQETVDLDQ | 495 |
| WP_016631044 | 379 | QAIIHRQAAYYPFLKE--NQE KIEQLVTFRIPYYVGPL SKGDa-STFAWLKR---QSEEPIRPWNLQETVDLDQ | 446 |
| EMS75795 | 163 | KAIIERQKPYYPSLEE--ARD KMIRLLTFRIPYYVGPL AQGEetSSFAWLER---KTPEKVTPWNATEVIDYSA | 231 |
| WP_002373311 | 428 | QAIIHRQAAYYPFLKE--NQE KIEQLVTFRIPYYVGPL SKGDa-STFAWLKR---QSEEPIRPWNLQETVDLDQ | 495 |
| WP_002378009 | 428 | QAIIHRQAAYYPFLKE--NQE KIEQLVTFRIPYYVGPL SKGDa-NTFAWLKR---QSEEPIRPWNLQETVDLDQ | 495 |
| WP_002407324 | 428 | QAIIHRQAAYYPFLKE--NQE KIEQLVTFRIPYYVGPL SKGDa-STFAWLKR---QSEEPIRPWNLQETVDLDQ | 495 |
| WP_002413717 | 428 | QAIIHRQAAYYPFLKE--NQE KIEQLVTFRIPYYVGPL SKGDa-STFAWLKR---QSEEPIRPWNLQETVDLDQ | 495 |
| WP_010775580 | 430 | QAIIHRQAAYYPFLKE--NOK KIEQLVTFRIPYYVGPL SKGDa-STFAWLKR---QSEEPIRPWNLQETVDLDO | 497 |
| WP_010818269 | 428 | QAIIHRQAAYYPFLKE--NQE KIEQLVTFRIPYYVGPL SKGDa-STFAWLKR---QSEEPIRPWNLQETVDLDQ | 495 |
| WP_010824395 | 428 | QAIIHRQAAYYPFLKE--NQE KIEQLVTFRIPYYVGPL SKGDa-STFAWLKR---QSEEPIRPWNLQETVDLDQ | 495 |
| WP_016622645 | 428 | QAIIHRQAAYYPFLKE--NQE KIEQLVTFRIPYYVGPL SKGDa-STFAWLKR---QSEEPIRPWNLQETVDLDQ | 495 |
| WP_033624816 | 428 | QAIIHRQAAYYPFLKE--NQK KIEQLVTFRIPYYVGPL SKGDa-STFAWLKR---QSEEPIRPWNLQETVDLDQ | 495 |
| WP_033625576 | 428 | QAIIHRQAAYYPFLKE--NQE KIEQLVTFRIPYYVGPL SKGDa-STFAWLKR---QNEKPIRPWNLQETVDLDO | 495 |
| WP_033789179 | 428 | QAIIHRQAAYYPFLKE--NQK KIEQLVTFRIPYYVGPL SKGDa-STFAWLKR---QSEEPIRPWNLQETVDLDQ | 495 |
| WP_002310644 | 424 | RAIIANQKKHYPFLKE--EQE KLESLLTFKIPYYVGPL AKKQenSPFAWLIR---KSEEKIKPWNLPEIVDMEG | 492 |
| WP_002312694 | 425 | RAIIANQKKHYPFLKE--EQE KLESLLTFKIPYYVGPL AKKQenSPFAWLIR---KSEEKIKPWNLPEIVDMEG | 493 |
| WP_002314015 | 425 | RAIIANQKKHYPFLKE--EQE KLESLLTFKIPYYVGPL AKKQenSPFAWLIR---KSEEKIKPWNLPEIVDMEG | 493 |
| WP_002320716 | 425 | RAIIANQKKHYPFLKE--EQE KLESLLTFKIPYYVGPL AKKQenSPFAWLIR---KSEEKIKPWNLPEIVDMEG | 493 |
| WP_002330729 | 424 | RAIIANQKKHYPFLKE--EQE KLESLLTFKIPYYVGPL AKKQenSPFAWLIR---KSEEKIKPWNLPEIVDMEG | 492 |
| WP_002335161 | 425 | RAIIANQKKHYPFLKE--EQE KLESLLTFKIPYYVGPL AKKQenSPFAWLIR---KSEEKIKPWNLPEIVDMEG | 493 |
| WP_002345439 | 425 | RAIIANQKKHYPFLKE--EQE KLESLLTFKIPYYVGPL AKKQenSPFAWLIR---KSEEKIKPWNLPEIVDMEG | 493 |
| WP_034867970 | 418 | KAIIDQQKQHYPFLEE--AGP KIIALFKFRIPYYVGPL AKEQeaSSFAWIER---KTAEKINPWNFSEVVDIEK | 486 |
| WP_047937432 | 425 | RAIIANQKKHYPFLKE--EQE KLESLLTFKIPYYVGPL AKKQenSPFAWLIR---KSEEKIKPWNLPEIVDMEG | 493 |
| WP_010720994 | 418 | KAIIDQQKQHYPFLEE--AGP KIIALFKFRIPYYVGPL AKEQeaSSFAWIER---KTAEKINPWNFSEVVDIEK | 486 |
| WP_010737004 | 418 | KAIIDQQKQHYPFLEE--AGP KIIALFKFRIPYYVGPL AKEQeaSSFAWIER---KTAEKINPWNFSEVVDIEK | 486 |
| WP_034700478 | 418 | KAIIDQQKQHYPFLEE--AGP KIIALFKFRIPYYVGPL AKEQeaSSFAWIER---KTAEKINPWNFSEVVDIEK | 486 |
| WP_007209003 | 422 | RAILRKQEKYYSFLKE--NHE KIEQIFKVRIPYYVGPL AKHNeqSRFAWNIR---KSDEPIRPWNMNDVVDENA | 490 |
| WP_023519017 | 418 | REIMDRQKRFYPFLKG--AQG KIEKLLTFRIPYYVGPL AQEGq-SPFAWIKR---KSPSQITPWNFAEVVDKEN | 485 |
| WP_010770040 | 423 | EAIIQKQATYYPFLAD--NKE EMKQLVTFRIPYYVGPL ADGN--SPFAWLER---ISSEPIRPGNLAEVVDIKK | 489 |
| WP_048604708 | 419 | KAILHHQAMYYPFLQE--KFS NFVDLLTFRIPYYVGPL ANGN--SRFSWLSR---KSDEPIRPWNLAEVVDLSK | 485 |
| WP_010750235 | 418 | KAIIDQQKQYYPFLEK--SKE KMIQLLTFRIPYYVGPL AQDKetSSFAWLER---KTTEKIKPWNAKDVIDYGA | 486 |
| AII16583 | 459 | HAILRRQEDFYPFLKD--NRE KIEKILTFRIPYYVGPL ARG-n-SRFAWMTR---KSEETITPWNFEEVVDKGA | 525 |
| WP_029073316 | 436 | NKILENQSVYYSDLKD--NED KIRSILTFRIPYYFGPL ITKDr--QFDWIIKkegKENERILPWNANEIVDVDK | 506 |
| WP_031589969 | 436 | NKILENQSVYYSDLKD--NED KIRSILTFRIPYYFGPL ITKDr--QFDWIIKkegKENERILPWNANEIVDVDK | 506 |
| KDA45870 | 418 | VAIVENQGKYYPFLRE--NKD KFEKILNFRIPYYVGPL ARGN--SKFAWLTR--a-GEGKITPYNFDEMIDKET | 484 |
| WP_039099354 | 426 | DRIIENQQQYYPWLAE-1NPN KLDELVAFRVPYYVGPL QQQSsdAKFAWMIR---KAEGQITPWNEDDKVDRQA | 509 |
| AKP02966 | 416 | EKIIDNQSQYYPFLKE--NKE KLLSILSFRIPYYVGPL -QSSekNPFAWMER---KSNGHARPWNFDEIVDREK | 483 |
| WP_010991369 | 426 | EAILHQQAKYYPFLKE--NYD KIKSLVTFRIPYFVGPL ANGQ--SEFAWLTR---KADGEIRPWNIEEKVDFGK | 492 |
| WP_033838504 | 426 | EAILHQQAKYYPFLKE--NYD KIKSLVTFRIPYFVGPL ANGQ--SEFAWLTR---KADGEIRPWNIEEKVDFGK | 492 |
| EHN60060 | 429 | EAILHQQAKYYPFLKE--NYD KIKSLVTFRIPYFVGPL ANGQ--SEFAWLTR---KADGEIRPWNIEEKVDFGK | 495 |
| EFR89594 | 195 | EAILHQQAKYYPFLKE--NYD KIKSLVTFRIPYFVGPL ANGQ--SEFAWLTR---KADGEIRPWNIEEKVDFGK | 261 |
| WP_038409211 | 426 | EAILHQQAKYYPFLRK--DYE KIRSLVTFRIPYFIGPL ANGQ--SDFAWLTR---KADGEIRPWNIEEKVDFGK | 492 |
| EFR95520 | 45 | EAILHQQAKYYPFLRK--DYE KIRSLVTFRIPYFIGPL ANGQ--SDFAWLTR---KADGEIRPWNIEEKVDFGK | 111 |
| WP_003723650 | 426 | EAIIHQQAKYYPFLKE--DYD KIKSLVTFRIPYFVGPL ANGQ--SEFAWLTR---KADGEIRPWNIEEKVDFGK | 492 |
| WP_003727705 | 426 | EAILHQQAKYYPFLRE--GYD KIKSLVTFRIPYFVGPL ANGQ--SEFAWLTR---KDDGEIRPWNIEEKVDFGK | 492 |
| WP_003730785 | 426 | EAILHQQAKYYPFLRE--GYD KIKSLVTFRIPYFVGPL ANGQ--SEFAWLTR---KDDGEIRPWNIEEKVDFGK | 492 |
| WP_003733029 | 426 | EAILHQQAKYYPFLRE--DYE KIKSLVTFRIPYFVGPL AKGQ--SEFAWLTR---KADGEIRPWNIEEKVDFGK | 492 |
| WP_003739838 | 426 | EAILHQQAKYYPFLKE--AYD KIKSLVTFRIPYFVGPL ANGQ--SDFAWLTR---KADGEIRPWNIEEKVDFGK | 492 |
| WP_014601172 | 426 | EAIIHQQAKYYPFLRE--DYE KIKSLVTFRIPYFVGPL AKGQ--SEFAWLTR---KADGEIRPWNIEEKVDFGK | 492 |
| WP_023548323 | 426 | EAILHQQAKYYPFLRE--DYE KIKSLVTFRIPYFVGPL AKGQ--SEFAWLTR---KADGEIRPWNIEEKVDFGK | 492 |
| WP_031665337 | 426 | EAIIHQQAKYYTFLKE--DYD KIKSLVTFRIPYFVGPL ANGQ--SEFAWLTR---KADGEIRPWNIEEKVDFGK | 492 |
| WP_031669209 | 426 | EAILHQQAKYYPFLRE--DYE KIKSLVTFRIPYFVGPL AKGQ--SEFAWLTR---KADGEIRPWNIEEKVDFGK | 492 |
| WP_033920898 | 426 | EAIIHQQAKYYPFLRE--DYE KIKSLVTFRIPYFVGPL AKGQ--SEFAWLTR---KADGEIRPWNIEEKVDEGK | 492 |
| AKI42028 | 429 | EAIIHQQAKYYPFLRE--DYE KIKSLVTFRIPYFVGPL AKGQ--SEFAWLTR---KADGEIRPWNIEEKVDFGK | 495 |
| AKI50529 | 429 | EAIIHQQAKYYPFLRE--DYE KIKSLVTFRIPYFVGPL AKGQ--SEFAWLTR---KADGEIRPWNIEEKVDFGK | 495 |
| EFR83390 | | --------------------- ----------------- ------------------------------------ | |
| WP_046323366 | 426 | EAILHQQAKYYPFLKV--DYE KIKSLVTFRIPYFVGPL ANGQ--SEFSWLTR---KADGEIRPWNIEEKVDFGK | 492 |
| AKE81011 | 436 | HAILRRQEDFYPFLKD--NRE KIEKILTFRIPYYVGPL ARG-n-SRFAWMTR---KSEETITPWNFEEVVDKGA | 502 |
| CUO82355 | 434 | IKIIDNQAKYYPVLKE--KRE QLLSILTFRIPYYFGPL ETSEh----AWIKRlegKENQRILPWNYQDTVDVDA | 502 |
| WP_033162887 | 435 | IQIIDNQSVYYPQLKE--NRD KLISILEFRIPYYFGPL AHSE----FAWIKKfedKQKERILPWNYDQIVDIDA | 503 |
| AGZ01981 | 453 | HAILRRQEDFYPFLKD--NRE KIEKILTFRIPYYVGPL ARG-n-SRFAWMTR---KSEETITPWNFEEVVDKGA | 519 |
| AKA60242 | 420 | HAILRRQEDFYPFLKD--NRE KIEKILTFRIPYYVGPL ARG-n-SRFAWMTR---KSEETITPWNFEEVVDKGA | 486 |
| AKS40380 | 420 | HAILRRQEDFYPFLKD--NRE KIEKILTFRIPYYVGPL ARG-n-SRFAWMTR---KSEETITPWNFEEVVDKGA | 486 |
| 4UN5_B | 424 | HAILRRQEDFYPFLKD--NRE KIEKILTFRIPYYVGPL ARG-n-SRFAWMTR---KSEETITPWNFEEVVDKGA | 490 |
| WP_010922251 | 487 | [chemical structure] | 561 |
| WP_039695303 | 490 | SAEKFITRMTLNDLYLPEEKVLPKHSHVYETYAVYNELTKIKYVN--EQGKES-FFDSNMKQEIFDHVFK--ENR-KVTK | 563 |
| WP_045635197 | 487 | SAEDFINKMTNYDLYLPEEKVLPKHSLLYETFAVYNELTKVKFIA--EGLRDYqFLDSGQKKQIVNOLFK--ENR-KVTE | 561 |
| 5AXW_A | 230 | --KEWYEMLMGHCTYFPEELRSVKYAYNADLYNALNDLNNLVITR--DENEKLeYYE---KFQIIENVFK--QKK-KPTL | 299 |
| WP_009880683 | 171 | SAQSFIERMTNFDKNLPNEKVLPKHSLLYEYFTVYNELTKVKYVT--EGMRKPaFLSGEQKKAIVDLLFK--TNR-KVTV | 245 |
| WP_010922251 | 487 | SAQSFIERMTNFDKNLPNEKVLPKHSLLYEYFTVYNELTKVKYVT--EGMRKPaFLSGEQKKAIVDLLFK--TNR-KVTV | 561 |
| WP_011054416 | 487 | SAQSFIERMTNFDKNLPNEKVLPKHSLLYEYFTVYNELTKVKYVT--EGMRKPaFLSGEQKKAIVDLLFK--TNR-KVTV | 561 |
| WP_011284745 | 487 | SAQSFIERMTNFDKNLPNEKVLPKHSLLYEYFTVYNELTKVKYVT--EGMRKPaFLSGEQKKAIVDLLFK--TNR-KVTV | 561 |
| WP_011285506 | 487 | SAQSFIERMTNFDKNLPNEKVLPKHSLLYEYFTVYNELTKVKYVT--EGMRKPaFLSGEQKKAIVDLLFK--TNR-KVTV | 561 |
| WP_011527619 | 487 | SAQSFIERMTNFDKNLPNEKVLPKHSLLYEYFTVYNELTKVKYVT--EGMRKPaFLSGEQKKAIVDLLFK--TNR-KVTV | 561 |
| WP_012560673 | 487 | SAQSFIERMTNFDKNLPNEKVLPKHSLLYEYFTVYNELTKVKYVT--EGMRKPaFLSGEQKKAIVDLLFK--TNR-KVTV | 561 |
| WP_014407541 | 487 | SAQSFIERMTNFDKNLPNEKVLPKHSLLYEYFTVYNELTKVKYVT--EGMRKPaFLSGEQKKAIVDLLFK--TNR-KVTV | 561 |
| WP_020905136 | 487 | SAQSFIERMTNFDKNLPNEKVLPKHSLLYEYFTVYNELTKVKYVT--EGMRKPaFLSGEQKKAIVDLLFK--TNR-KVTV | 561 |
| WP_023080005 | 487 | SAQSFIERMTNFDKNLPNEKVLPKHSLLYEYFTVYNELTKVKYVT--EGMRKPaFLSGEQKKAIVDLLFK--TNR-KVTV | 561 |
| WP_023610282 | 487 | SAQSFIERMTNFDKNLPNEKVLPKHSLLYEYFTVYNELTKVKYVT--EGMRKPaFLSGEQKKAIVDLLFK--TNR-KVTV | 561 |
| WP_030125963 | 487 | SAQSFIERMTNFDKNLPNEKVLPKHSLLYEYFTVYNELTKVKYVT--EGMRKPaFLSGEQKKAIVDLLFK--TNR-KVTV | 561 |
| WP_030126706 | 487 | SAQSFIERMTNFDKNLPNEKVLPKHSLLYEYFTVYNELTKVKYVT--EGMRKPaFLSGEQKKAIVDLLFK--TNR-KVTV | 561 |
| WP_031488318 | 487 | SAQSFIERMTNFDKNLPNEKVLPKHSLLYEYFTVYNELTKVKYVT--EGMRKPeFLSGEQKKAIVDLLFK--TNR-KVTV | 561 |
| WP_032460140 | 487 | SAQSFIERMTNFDKNLPNEKVLPKHSLLYEYFTVYNELTKVKYVT--EGMRKPaFLSGEQKKAIVDLLFK--TNR-KVTV | 561 |
| WP_032461047 | 487 | SAQSFIERMTNFDKNLPNEKVLPKHSLLYEYFTVYNELTKVKYVT--EGMRKPaFLSGEQKKAIVDLLFK--TNR-KVTV | 561 |
| WP_032462016 | 487 | SAQSFIERMTNFDKNLPNEKVLPKHSLLYEYFTVYNELTKVKYVT--EGMRKPaFLSGEQKKAIVDLLFK--TNR-KVTV | 561 |
| WP_032462936 | 487 | SAQSFIERMTNFDKNLPNEKVLPKHSLLYEYFTVYNELTKVKYVT--EGMRKPaFLSGEQKKAIVDLLFK--TNR-KVTV | 561 |
| WP_032464890 | 487 | SAQSFIERMTNFDKNLPNEKVLPKHSLLYEYFTVYNELTKVKYVT--EGMRKPaFLSGEQKKAIVDLLFK--TNR-KVTV | 561 |
| WP_033888930 | 312 | SAQSFIERMTNFDKNLPNEKVLPKHSLLYEYFTVYNELTKVKYVT--EGMRKPaFLSGEQKKAIVDLLFK--TNR-KVTV | 386 |
| WP_038431314 | 487 | SAQSFIERMTNFDKNLPNEKVLPKHSLLYEYFTVYNELTKVKYVT--EGMRKPaFLSGEQKKAIVDLLFK--TNR-KVTV | 561 |
| WP_038432938 | 487 | SAQSFIERMTNFDKNLPNEKVLPKHSLLYEYFTVYNELTKVKYVT--EGMRKPaFLSGEQKKAIVDLLFK--TNR-KVTV | 561 |
| WP_038434062 | 487 | SAQSFIERMTNFDKNLPNEKVLPKHSLLYEYFTVYNELTKVKYVT--EGMRKPaFLSGEQKKAIVDLLFK--TNR-KVTV | 561 |
| BAQ51233 | 398 | SAQSFIERMTNFDKNLPNEKVLPKHSLLYEYFTVYNELTKVKYVT--EGMRKPaFLSGEQKKAIVDLLFK--TNR-KVTV | 472 |
| KGE60162 | | -------------------------------------------------------------------------------- | |
| KGE60856 | | -------------------------------------------------------------------------------- | |
| WP_002989955 | 487 | SAQSFIERMTNFDKNLPNEKVLPKHSLLYEYFTVYNELTKVKYVT--EGMRKPaFLSGEQKKAIVDLLFK--TNR-KVTV | 561 |
| WP_003030002 | 487 | SAEKFITRMTLNDLYLPEEKVLPKHSLLYETFTVYNELTKVKYVN--EQGEAK-FFDANMKQEIFDHVFK--ENR-KVTK | 560 |
| WP_003065552 | 490 | SAEKFITRMTLNDLYLPEEKVLPKHSHVYETYAVYNELTKIKYVN--EQGKDS-FFDSNMKQEIFDHVFK--ENR-KVTK | 563 |
| WP_001040076 | 488 | SAEAFIHRMTNNDLYLPEEKVLPKHSLIYEKFTVYNELTKVRFLA--EGFKDFqFLNRKQKETIFNSLFK--EKR-KVTE | 562 |
| WP_001040078 | 488 | SAEAFIHRMTNNDFYLPEEKVLPKHSLIYEKFTVYNELTKVRYKN--EQGETY-FFDSNIKQEIFDGVFK--EHR-KVSK | 561 |
| WP_001040080 | 488 | SAEAFIHRMTNNDFYLPEEKVLPKHSLIYEKFTVYNELTKVRYKN--EQGETY-FFDSNIKQEIFDGVFK--EHR-KVSK | 561 |
| WP_001040081 | 488 | SAEAFIHRMTNNDFYLPEEKVLPKHSLIYEKFTVYNELTKVRYKN--EQGETY-FFDSNIKQEIFDGVFK--EHR-KVSK | 561 |
| WP_001040083 | 488 | SAEAFIHRMTNNDFYLPEEKVLPKHSLIYEKFTVYNELTKVRYKN--EQGETY-FFDSNIKQEIFDGVFK--EHR-KVSK | 561 |
| WP_001040085 | 488 | SAEAFIHRMTNNDFYLPEEKVLPKHSLIYEKFTVYNELTKVRYKN--EQGETY-FFDSNIKQEIFDGVFK--EHR-KVSK | 561 |
| WP_001040087 | 488 | SAEAFIHRMTNNDFYLPEEKVLPKHSLIYEKFTVYNELTKVRYKN--EQGETY-FFDSNIKQEIFDGVFK--EHR-KVSK | 561 |
| WP_001040088 | 488 | SAEAFIHRMTNNDFYLPEEKVLPKHSLIYEKFTVYNELTKVRYKN--EQGETY-FFDSNIKQEIFDGVFK--EHR-KVSK | 561 |
| WP_001040089 | 488 | SAEAFHIRMTNNDFYLPEEKVLPKHSLIYEKFTVYNELTKVRYKN--EQGETY-FFDSNIKQEIFDGVFK--EHR-KVSK | 561 |
| WP_001040090 | 488 | SAEAFIHRMTNNDFYLPEEKVLPKHSLIYEKFTVYNELTKVRYKN--EQGETY-FFDSNIKQEIFDGVFK--EHR-KVSK | 561 |
| WP_001040091 | 488 | SAEAFIHRMTNNDFYLPEEKVLPKHSLIYEKFTVYNELTKVRYKN--EQGETY-FFDSNIKQEIFDGVFK--EHR-KVSK | 561 |
| WP_001040092 | 488 | SAEAFIHRMTNNDLYLPEEKVLPKHSLIYEKFTVYNELTKVRYKN--EQGETY-FFDSNVKQEIFDGVFK--EHR-KVSK | 561 |
| WP_001040094 | 488 | SAEAFIHRMTNNDLYLPEEKVLPKHSLIYEKFTVYNELTKVRFLA--EGFKDFqFLNRKQKETIFNSLFK--EKR-KVTE | 562 |
| WP_001040095 | 488 | SAEAFIHRMTNNDLYLPEEKVLPKHSLIYEKFTVYNELTKVRFLA--EGFKDFqFLNRKQKETIFNSLFK--EKR-KVTE | 562 |
| WP_001040096 | 488 | SAEAFIHRMTNNDLYLPEEKVLPKHSLIYEKFTVYNELTKVRFLA--EGFKDFqFLNRKQKETIFNSLFK--EKR-KVTE | 562 |
| WP_001040097 | 488 | SAEAFIHRMTNNDLYLPEEKVLPKHSLIYEKFTVYNELTKVRFLA--EGFKDFqFLNRKQKETIFNSLFK--EKR-KVTE | 562 |
| WP_001040098 | 488 | SAEAFIHRMTNNDLYLPEEKVLPKHSLIYEKFTVYNELTKVRFLA--EGFKDFqFLNRKQKETIFNSLFK--EKR-KVTE | 562 |
| WP_001040099 | 488 | SAEAFIHRMTNNDLYLPEEKVLPKHSLIYEKFTVYNELTKVRFLA--EGFKDFqFLNRKQKETIFNSLFK--EKR-KVTE | 562 |
| WP_001040100 | 488 | SAEAFIHRMTNNDLYLPEEKVLPKHSLIYEKFTVYNELTKVRFLA--EGFKDFqFLNRKQKETIFNSLFK--EKR-KVTE | 562 |
| WP_001040104 | 488 | SAEAFIHRMTNNDFYLPEEKVLPKHSLIYEKFTVYNELTKVRYKN--EQGETY-FFDSNIKQEIFDGVFK--EHR-KVSK | 561 |
| WP_001040105 | 488 | SAEAFIHRMTNNDFYLPEEKVLPKHSLIYEKFTVYNELTKVRYKN--EQGETY-FFDSNIKQEIFDGVFK--EHR-KVSK | 561 |
| WP_001040106 | 488 | SAEAFIHRMTNNDLYLPEEKVLPKHSLIYEKFTVYNELTKVRYKN--EQGETY-FFDSNIKQEIFDGVFK--EHR-KVSK | 561 |
| WP_001040107 | 488 | SAEAFIHRMTNNDLYLPEEKVLPKHSLIYEKFTVYNELTKVRYKN--EQGETY-FFDSNIKQEIFDGVFK--EHR-KVSK | 561 |
| WP_001040108 | 488 | SAEAFIHRMTNNDLYLPEEKVLPKHSLIYEKFTVYNELTKVRYKN--EQGETY-FFDSNIKQEIFDGVFK--EHR-KVSK | 561 |
| WP_001040109 | 488 | SAEAFIHRMTNNDLYLPEEKVLPKHSLIYEKFTVYNELTKVRYKN--EQGETY-FFDSNIKQEIFDGVFK--EHR-KVSK | 561 |
| WP_001040110 | 488 | SAEAFIHRMTNNDLYLPEEKVLPKHSLIYEKFTVYNELTKVRYKN--EQGETY-FFDSNIKQEIFDGVFK--EHR-KVSK | 561 |
| WP_015058523 | 488 | SAEAFIHRMTNNDLYLPEEKVLPKHSLIYEKFTVYNELTKVRYKN--EQGETY-FFDSNVKQEIFDGVFK--EHR-KVSK | 561 |
| WP_017643650 | 488 | SAEAFIHRMTNNDLYLPEEKVLPKHSLIYEKFTVYNELTKVRFLA--EGFKDFqFLNRKQKETIFNSLFK--EKR-KVTE | 562 |
| WP_017647151 | 488 | SAEAFIHRMTNNDLYLPEEKVLPKHSLIYEKFTVYNELTKVRYKN--EQGETY-FFDSNIKQEIFDGVFK--EHR-KVSK | 561 |
| WP_017648376 | 488 | SAEAFIHRMTNNDLYLPEEKVLPKHSLIYEKFTVYNELTKVRYKN--EQGETY-FFDSNIKQEIFDGVFK--EHR-KVSK | 561 |
| WP_017649527 | 488 | SAEAFIHRMTNNDFYLPEEKVLPKHSLIYEKFTVYNELTKVRYKN--EQGETY-FFDSNIKQEIFDGVFK--EHR-KVSK | 561 |
| WP_017771611 | 488 | SAEAFIHRMTNNDLYLPEEKVLPKHSLIYEKFTVYNELTKVRYKN--EQGETY-FFDSNIKQEIFDGVFK--EHR-KVSK | 561 |
| WP_017771984 | 488 | SAEAFIHRMTNNDFYLPEEKVLPKHSLIYEKFTVYNELTKVRYKN--EQGETY-FFDSNIKQEIFDGVFK--EHR-KVSK | 561 |
| CFQ25032 | 488 | SAEAFIHRMTNNDFYLPEEKVLPKHSLIYEKFTVYNELTKVRYKN--EQGETY-FFDSNIKQEIFDGVFK--EHR-KVSK | 561 |
| CFV16040 | 488 | SAEAFIHRMTNNDFYLPEEKVLPKHSLIYEKFTVYNELTKVRYKN--EQGETY-FFDSNIKQEIFDGVFK--EHR-KVSK | 561 |
| KLJ37842 | 488 | SAEAFIHRMTNNDFYLPEEKVLPKHSLIYEKFTVYNELTKVRYKN--EQGETY-FFDSNIKQEIFDGVFK--EHR-KVSK | 561 |
| KLJ72361 | 488 | SAEAFIHRMTNNDFYLPEEKVLPKHSLIYEKFTVYNELTKVRYKN--EQGETY-FFDSNIKQEIFDGVFK--EHR-KVSK | 561 |
| KLL20707 | 488 | SAEAFIHRMTNNDFYLPEEKVLPKHSLIYEKFTVYNELTKVRYKN--EQGETY-FFDSNIKQEIFDGVFK--EHR-KVSK | 561 |
| KLL42645 | 488 | SAEAFIHRMTNNDLYLPEEKVLPKHSLIYEKFTVYNELTKVRYKN--EQGETY-FFDSNIKQEIFDGVFK--EHR-KVSK | 561 |
| WP_047207273 | 488 | SAEAFIHRMTNNDFYLPEEKVLPKHSLIYEKFTVYNELTKVRYKN--EQGETY-FFDSNIKQEIFDGVFK--EHR-KVSK | 561 |
| WP_047209694 | 488 | SAEAFIHRMTNNDLYLPEEKVLPKHSLIYEKFTVYNELTKVRFLA--EGFKDFqFLNRKQKETIFNSLFK--EKR-KVTE | 562 |
| WP_050198062 | 488 | SAEAFIHRMTNNDFYLPEEKVLPKHSLIYEKFTVYNELTKVRYKN--EQGETY-FFDSNIKQEIFDGVFK--EHR-KVSK | 561 |
| WP_050201642 | 488 | SAEAFIHRMTNNDFYLPEEKVLPKHSLIYEKFTVYNELTKVRYKN--EQGETY-FFDSNIKQEIFDGVFK--EHR-KVSK | 561 |
| WP_050204027 | 488 | SAEAFIHRMTNNDLYLPEEKVLPKHSLIYEKFTVYNELTKVRYKN--EQGETY-FFDSNIKQEIFDGVFK--EHR-KVSK | 561 |
| WP_050881965 | 488 | SAEAFIHRMTNNDFYLPEEKVLPKHSLIYEKFTVYNELTKVRYKN--EQGETY-FFDSNIKQEIFDGVFK--EHR-KVSK | 561 |
| WP_050886065 | 488 | SAEAFIHRMTNNDFYLPEEKVLPKHSLIYEKFTVYNELTKVRYKN--EQGETY-FFDSNIKQEIFDGVFK--EHR-KVSK | 561 |
| AHN30376 | 488 | SAEAFIHRMTNNDLYLPEEKVLPKHSLIYEKFTVYNELTKVRYKN--EQGETY-FFDSNVKQEIFDGVFK--EHR-KVSK | 561 |
| EAO78426 | 488 | SAEAFIHRMTNNDFYLPEEKVLPKHSLIYEKFTVYNELTKVRYKN--EQGETY-FFDSNIKQEIFDGVFK--EHR-KVSK | 561 |
| CCW42055 | 488 | SAEAFIHCMTNNDLYLPEEKVLPKHSLIYEKFTVYNELTKVRYKN--EQGETY-FFDSNIKQEIFDGVFK--EYR-KVSK | 561 |
| WP_003041502 | 487 | SAEKFITRMTLNDLYLPEEKVLPKHSLLYETFTVYNELTKVKYVN--EQGEAK-FFDANMKQEIFDHVFK--ENR-KVTK | 560 |
| WP_037593752 | 488 | SAEKFITRMTLNDLYLPEEKVLPKHSPLYETFTVYNELTKVKYVN--EQGEAK-FFDTNMKQEIFDHVFK--ENR-KVTK | 561 |
| WP_049516684 | 488 | SAEKFITRMTLNDLYLPEEKVLPKHSPLYETFTVYNELTKVKYVN--EQGEAK-FFDTNMKQEIFDHVFK--ENR-KVTK | 561 |
| GAD46167 | 487 | SAEKFITRMTLNDLYLPEEKVLPKHSPLYETFTVYNELTKVKYVN--EQGEAK-FFDTNMKQEIFDHVFK--ENR-KVTK | 560 |
| WP_018363470 | 488 | SAEKFITRMTLNDLYLPEEKVLPKHSHVYETFAVYNELTKVKYVN--EQGKDS-FFDSNMKQEIFDHVFK--ENR-KVTK | 561 |
| WP_003043819 | 497 | SAQSFIERMTNFDEQLPNKKVLPKHSLLYEYFTVYNELTKVKYVT--ERMRKPeFLSGEQKKAIVDLLFK--TNR-KVTV | 571 |
| WP_006269658 | 487 | SAEKFITRMTLNDLYLPEEKVLPKHSPLYEAFTVYNELTKVKYVN--EQGEAK-FFDTNMKQEIFDHVFK--ENR-KVTK | 560 |
| WP_048800889 | 487 | SAEKFITRMTLNDLYLPEEKVLPKHSLLYEIFTVYNELTKVKYVN--EQGEAK-FFDANMKQEIFDHVFK--ENP-KVTK | 560 |
| WP_012767106 | 487 | SAQSFIERMTNFDKNLPNEKVLPKHSLLYEYFTVYNELTKVKYVT--EGMRKPeFLSGKQKEAIVDLLFK--TNR-KVTV | 561 |
| WP_014612333 | 487 | SAQSFIERMTNFDKNLPNEKVLPKHSLLYEYFTVYNELTKVKYVT--EGMRKPeFLSGKQKEAIVDLLFK--TNR-KVTV | 561 |
| WP_015017095 | 487 | SAQSFIERMTNFDKNLPNEKVLPKHSLLYEYFTVYNELTKVKYVT--EGMRKPeFLSGKQKEAIVDLLFK--TNR-KVTV | 561 |
| WP_015057649 | 487 | SAQSFIERMTNFDKNLPNEKVLPKHSLLYEYFTVYNELTKVKYVT--EGMRKPeFLSGKQKEAIVDLLFK--TNR-KVTV | 561 |
| WP_048327215 | 487 | SAQSFIERMTNFDKNLPNEKVLPKHSLLYEYFTVYNELTKVKYVT--EGMRKPeFLSGKQKEAIVDLLFK--TNR-KVTV | 561 |
| WP_049519324 | 487 | SAQSFIERMTNFDKNLPNEKVLPKHSLLYEYFTVYNELTKVKYVT--EGMRKPaFLSGEQKKAIVDLLFK--TNR-KVTV | 561 |
| WP_012515931 | 487 | SAQIFIEKMTKNDLYLPNEKVLPKHSLLYETFTVYNELTKVKYAT--EGMTRPqFLSADQKQAIVDLLFK--TNR-KVTV | 561 |
| WP_021320964 | 487 | SAQIFIEKMTKNDLYLPNEKVLPKHSLLYETFTVYNELTKVKYAT--EGMTRPqFLSADQKQAIVDLLFK--TNR-KVTV | 561 |
| WP_037581760 | 487 | SAQIFIEKMTKNDLYLPNEKVLPKHSLLYETFTVYNELTKVKYAT--EGMTRPqFLSADQKQAIVDLLFK--TNR-KVTV | 561 |
| WP_004232481 | 487 | SAEKFITRMTLNDLYLPEEKVLPKHSYVYETFAVYNELTKIKYVN--EQGKSF-FFDANMKQEIFDHVFK--ENR-KVTK | 560 |
| WP_009854540 | 488 | SAEKFITRMTLNDLYLPEEKVLPKHSHVYETYAVYNELTKIKYVN--EQGKES-FFDSNMKQEIFDHVFK--ENR-KVTK | 561 |
| WP_012962174 | 488 | SAEKFITRMTLNDLYLPEEKVLPKHSLVYETYTVYNELTKVKYVN--EQGKSN-FFDANMKQEIFEHVFK--ENR-KVTK | 561 |
| WP_039695303 | 490 | SAEKFITRMTLNDLYLPEEKVLPKHSHVYETYAVYNELTKIKYVN--EQGKES-FFDSNMKQEIFDHVFK--NR-KVTK | 563 |
| WP_014334983 | 487 | SAEKFITRMTLNDLYLPEEKVLPKHSHVYETFTVYNELTKIKYVN--EQGESF-FFDANMKQEIFDHVFK--ENR-KVTK | 560 |
| WP_003099269 | 487 | SARAFIERMTNFDTYLPEEKVLPKHSPLYEMFMVYNELTKVKYQT--EGMKRPVFLSSEDKEEIVNLLFK--KER-KVTV | 561 |
| AHY15608 | 487 | SARAFIERMTNFDTYLPEEKVLPKHSPLYEMFMVYNELTKVKYQT--EGMKRPVFLSSEDKEEIVNLLFK--KER-KVTV | 561 |
| AHY17476 | 487 | SARAFIERMTNFDTYLPEEKVLPKHSPLYEMFMVYNELTKVKYQT--EGMKRPVFLSSEDKEEIVNLLFK--KER-KVTV | 561 |
| ESR09100 | | -------------------------------------------------------------------------------- | |
| AGM98575 | 487 | SARAFIERMTNFDTYLPEEKVLPKHSPLYEMFMVYNELTKVKYQT--EGMKRPVFLSSEDKEEIVNLLFK--KER-KVTV | 561 |
| ALF27331 | 487 | SAEAFINRMTNYDLYLPNQKVLPRHSLLYEKFTVYNELTKVKYKT--EQGKTA-FFDANMKQEIFDGVFK--VYR-KVTK | 560 |
| WP_018372492 | 500 | SASRFIERMTLHDLYLPDEKVLPRHSLIYEKYTVFNELTKVRFTP--EGGKEV-YFSKIDKENIFDSLFK--RYR-KVTK | 573 |
| WP_045618028 | 488 | SAEDFINKMTNYDLYLPEEKVLPKHSLLYETFAVYNELTKVKFIA--EGLRDYqFLDSGQKQQIVTQLFK--EKR-KVTE | 562 |
| WP_045635197 | 487 | SAEDFINKMTNYDLYLPEEKVLPKHSLLYETFAVYNELTKVKFIA--EGLRDYqFLDSGQKKQIVNQLFK--ENR-KVTE | 561 |
| WP_002263549 | 487 | SAEAFINRMTNYDLYLPNQKVLPKHSLLYEKFTVYNELTKVKYKT--EQGKTA-FFDANMKQEIFDGVFK--VYR-KVTK | 560 |
| WP_002263887 | 487 | SAEAFINRMTNYDLYLPNQKVLPKHSLLYEKFTVYNELIKVKYKT--EQGKTA-FFDANMKQEIFDGVFK--VYR-KVTK | 560 |
| WP_002264920 | 487 | SVEAFINRMTNYDLYLPNQKVLPKHSLLYEKFTVYNELTKVKYKT--EQGKTA-FFDANMKQEIFDGVFK--VYR-KVTK | 560 |
| WP_002269043 | 487 | SVEAFINRMTNYDLYLPNQKVLPKHSLLYEKFTVYNELTKVKYKT--EQGKTA-FFDANMKQEIFDGVFK--VYR-KVTK | 560 |
| WP_002269448 | 487 | SAEAFINRMTNYDLYLPNQKVLPKHSLLYEKFTVYNELTKVKYKT--EQGKTA-FFDANMKQEIFDGVFK--VYR-KVTK | 560 |
| WP_002271977 | 487 | SAEAFINRMTNYDLYLPNQKVLPKHSLLYEKFTVYNELTKVKYKT--EQGKTA-FFDANMKQEIFDGVFK--VYR-KVTK | 560 |
| WP_002272766 | 487 | SAEAFINRMTNYDLYLPNQKVLPKHSLLYEKFTVYNELTKVKYKT--EQGKTA-FFDANMKQEIFDGVFK--VYR-KVTK | 560 |
| WP_002273241 | 487 | SAEAFINRMTNYDLYLPNQKVLPKHSLLYEKFTVYNELTKVKYKT--EQGKTA-FFDANMKQEIFDGVFK--VYR-KVTK | 560 |
| WP_002275430 | 487 | SAEAFINRMTNYDLYLPNQKVLPKHSLLYEKFTVYNELTKVKYKT--EQGKTA-FFDANMKQEIFDGVFK--VYR-KVTK | 560 |
| WP_002276448 | 487 | SAEAFINRMTNYDLYLPNQKVLPKHSLLYEKFTVYNELTKVKYKT--EQGKTA-FFDANMKQEIFDGVFK--VYR-KVTK | 560 |
| WP_002277050 | 487 | SAQAFIEHMTNNDLYLPNEKVLPKHSPLYEKYTVYNELTKIKYVT--EIGEAK-FFDANLKQEIFDGLFK--HER-KVTK | 560 |
| WP_002277364 | 487 | SAEAFINRMTNYDLYLPNQKVLPKHSLLYEKFTVYNELTKVKYKT--EQGKTA-FFDANMKQEIFDGVFK--VYR-KVTK | 560 |
| WP_002279025 | 487 | SAEAFINRMTNYDLYLPNQKVLPKHSLLYEKFTVYNELTKVKYKT--EQGETA-FFDANMKQEIFDGVFK--VYR-KVTK | 560 |
| WP_002279859 | 487 | SVEAFINRMTNYDLYLPNQKVLPKHSLLYEKFTVYNELTKVKYKT--EQGKTA-FFDANMKQEIFDGVFK--VYR-KVTK | 560 |
| WP_002280230 | 487 | SAEAFINRMTNYDLYLPNQKVLPKHSLLYEKFTVYNELTKVKYKT--EQGKTA-FFDANMKQEIFDGVFK--VYR-KVTK | 560 |
| WP_002281696 | 487 | SAEAFINRMTNYDLYLPNQKVLPKHSLLYEKFTVYNELTKVKYKT--EQGKTA-FFDANMKQEIFDGVFK--VYR-KVTK | 560 |
| WP_002282247 | 487 | SAQAFIEHMTNNDLYLPNEKVLPKHSPLYEKYTVYNELTKIKYVT--EIGEAK-FFDANLKQEIFDGLFK--HER-KVTK | 560 |
| WP_002282906 | 487 | SAEAFINRMTNYDLYLPNQKVLPKHSLLYEKFTVYNELTKVKYKT--EQGKTA-FFDANMKQEIFDGVFK--VYR-KVTK | 560 |
| WP_002283846 | 487 | SVEAFINRMTNYDLYLPNQKVLPKHSLLYEKFTVYNELTKVKYKT--EQGKTA-FFDANMKQEIFDGVFK--VYR-KVTK | 560 |
| WP_002287255 | 487 | SAEAFINRMTNYDLYLPNQKVLPKHSLLYEKFTVYNELTKVKYKT--EQGKTA-FFDANMKQEIFDGVFK--VYR-KVTK | 560 |
| WP_002288990 | 487 | SVEAFINRMTNYDLYLPNQKVLPKHSLLYEKFTVYNELTKVKYKT--EQGKTA-FFDANMKQEIFDGVFK--VYR-KVTK | 560 |
| WP_002289641 | 487 | SAEAFINRMTNYDLYLPNQKVLPKHSLLYEKFTVYNELTKVKYKT--EQGKTA-FFDANMKQEIFDGVFK--VYR-KVTK | 560 |
| WP_002290427 | 487 | SAEAFINRMTNYDLYLPNQKVLPKHSLLYEKFTVYNELTKVKYKT--EQGKTA-FFDANMKQEIFDGVFK--VYR-KVTK | 560 |
| WP_002295753 | 487 | SAEAFINRMTNYDLYLPNQKVLPKHSLLYEKFTVYNELTKVKYKT--EQGKTA-FFDANMKQEIFDGVFK--VYR-KVTK | 560 |
| WP_002296423 | 487 | SVEAFINRMTNYDLYLPNQKVLPKHSLLYEKFTVYNELTKVKYKT--EQGKTA-FFDANMKQEIFDGVFK--VYR-KVTK | 560 |
| WP_002304487 | 497 | SAEKFITRMTLNDLYLPEEKVLPKHSLLYETFTVYNELTKVKYVN--EQGEAK-FFDANMKQEIFDHVFK--ENR-KVTK | 570 |
| WP_002305844 | 487 | SAEAFINRMTNYDLYLPNQKVLPKHSLLYEKFTVYNELTKVKYKT--EQGKTA-FFDANMKQEIFDGVFK--VYR-KVTK | 560 |
| WP_002307203 | 487 | SVEAFINRMTNYDLYLPNQKVLPKHSLLYEKFTVYNELTKVKYKT--EQGKTA-FFDANMKQEIFDGVFK--VYR-KVTK | 560 |
| WP_002310390 | 487 | SAEAFINRMTNYDLYLPNQKVLPKHSLLYEKFTVYNELTKVKYKT--EQGKTA-FFDANMKQEIFDGVFK--VYR-KVTK | 560 |
| WP_002352408 | 487 | SAEAFINRMTNYDLYLPNQKVLPKHSLLYEKFTVYNELTKVKYKT--EQGKTA-FFDANMKQEIFDGVFK--VYR-KVTK | 560 |
| WP_012997688 | 487 | SAEAFINRMTNYDLYLPNQKVLPKHSLLYEKFTVYNELTKVKYKT--EQGKTA-FFDANMKQEIFDGVFK--VYR-KVTK | 560 |
| WP_014677909 | 487 | SVEAFINRMTNYDLYLPNQKVLPKHSLLYEKFTVYNELTKVKYKT--EQGKTA-FFDANMKQEIFDGVFK--VYR-KVTK | 560 |
| WP_019312892 | 487 | SAEAFINRMTNYDLYLPNQKVLPKHSLLYEKFTVYNELTKVKYKT--EQGKTA-FFDANMKQEIFDGVFK--VYR-KVTK | 560 |
| WP_019313659 | 487 | SAEAFINRMTNYDLYLPNQKVLPKHSLLYEKFTVYNELTKVKYKT--EQGKTA-FFDANMKQEIFDGVFK--VYR-KVTK | 560 |
| WP_019314093 | 487 | SVEAFINRMTNYDLYLPNQKVLPKHSLLYEKFTVYNELTKVKYKT--EQGKTA-FFDANMKQEIFDGVFK--VYR-KVTK | 560 |
| WP_019315370 | 487 | SAEAFINRMTNYDLYLPNQKVLPKHSLLYEKFTVYNELTKVKYKT--EQGKTA-FFDANMKQEIFDGVFK--VYR-KVTK | 560 |
| WP_019803776 | 487 | SAEAFINRMTNYDLYLPNQKVLPKHSLLYEKFTVYNELTKVKYKT--EQGKTA-FFDANMKQEIFDGVFK--VYR-KVTK | 560 |
| WP_019805234 | 487 | SAEAFINRMTNYDLYLPNQKVLPKHSLLYEKFTVYNELTKVKYKT--EQGKTA-FFDANMKQEIFDGVFK--VYR-KVTK | 560 |
| WP_024783594 | 487 | SAEAFINRMTNYDLYLPNQKVLPKHSLLYEKFTVYNELTKVKYKT--EQGKTA-FFDANMKQEIFDGVFK--VYR-KVTK | 560 |
| WP_024784288 | 487 | SAQAFIEHMTNNDLYLPNEKVLPKHSPLYEKYTVYNELTKIKYVT--EIGEAK-FFDANLKQEIFDGLFK--HER-KVTK | 560 |
| WP_024784666 | 487 | SAEAFINRMTNYDLYLPNQKVLPKHSLLYEKFTVYNELTKVKYKT--EQGKTA-FFDANMKQEIFDGVFK--VYR-KVTK | 560 |
| WP_024784894 | 487 | SAEAFINRMTNYDLYLPNQKVLPKHSLLYEKFTVYNELTKVKYKT--EQGKTA-FFDANMKQEIFDGVFK--VYR-KVTK | 560 |
| WP_024786433 | 487 | SAQAFIEHMTNNDLYLPNEKVLPKHSPLYEKYTVYNELTKIKYVT--EIGEAK-FFDANLKQEIFDGLFK--HER-KVTK | 560 |
| WP_049473442 | 487 | SAEAFINRMTNYDLYLPNQKVLPKHSLLYEKFTVYNELTKVKYKT--EQGKTA-FFDANMKQEIFDGVFK--VYR-KVTK | 560 |
| WP_049474547 | 487 | SAEAFINRMTNYDLYLPNQKVLPKHSLLYEKFTVYNELTKVKYKT--EQGKTA-FFDANMKQEIFDGVFK--VYR-KVTK | 560 |
| EMC03581 | 480 | SAEAFINRMTNYDLYLPNQKVLPKHSLLYEKFTVYNELTKVKYKT--EQGKTA-FFDANMKQEIFDGVFK--VYR-KVTK | 553 |
| WP_000428612 | 488 | SAESFINKMTNYDLYLPEEKVLPKHSLLYETFAVYNELTKVKFIA--EGLRDYqFLDSROKKDIFYTLFKaeDKR-KVTE | 564 |
| WP_000428613 | 488 | SAEDFINKMTNYDLYLPEEKVLPKHSLLYETFAVYNELTKVKFIA--EGLRDYqFLDSGQKKQIVTQLFK--EKR-KVTE | 562 |
| WP_049523028 | 487 | SAEDFIHRMTNYDLYLPEEKVLPKHSLLYETFTVYNELTKVKYIA--EGMKDYqFLDSGOKKQIVNOLFK--EKR-KVTE | 561 |
| WP_003107102 | 456 | SAKVFIERMTNFDTYLPEEKVLPKHSLLYEMFTVYNELTKVKYQA--EGMRKPeFLSSEEKIEIVSNLFK--TER-KVTV | 530 |
| WP_054279288 | 489 | SAQAFIERMTNFDEYLPQEKVLPKHSLTYEYFTVYNELTKVKYVT--EGMTKPeFLSAGQKEQIVELLFK--KYR-KVTV | 563 |
| WP_049531101 | 488 | SAEAFINKMTNYDLYLPEEKVLPKHSLLYETFAVYNELTKVKFIA--EGLRDYqFLDSGQKKKIINQLFK--EKR-KVTE | 562 |
| WP_049538452 | 488 | SAEDFINKMTNYDLYLPEEKVLPKHSLLYETFAVYNELTKVKFIA--EGLRDYqFLDSGQKKQIVNOLFK--EKR-KVTE | 562 |
| WP_049549711 | 488 | SAEDFINKMTNYDLYLPEEKVLPKHSLLYETFAVYNELTKVKFIA--EGLRDYqFLDSGQKKQIVNQLFK--EKR-KVTE | 562 |
| WP_007896501 | 490 | SAQAFIEGMTNYDTYLPEEKVLPKHSPLYEMFTVYNELTKVKYIA--ENMTKPIYLSAEQKEAIIDHLFK--QTR-KVTV | 564 |
| EFR44625 | 442 | SAQAFIEGMTNYDTYLPEEKVLPKHSPLYEMFTVYNELTKVKYIA--ENMTKP1YLSAEQKEAIIDHLFK--QTR-KVTV | 516 |
| WP_002897477 | 487 | SAEDFIHRMTNYDLYLPEEKVLPKHSLLYETFAVYNELTKVKFIA--EGLRDYqFLDSGQKKQIVNQLFK--EKR-KVTE | 561 |
| WP_002906454 | 487 | SAEDFINKMTNYDLYLPEEKVLPKHSLLYETFAVYNELTKVKFIA--EGLRDYqFLDSGQKKQIVNQLFK--DKR-KVTE | 561 |
| WP_009729476 | 488 | SAEDFINKMTNYDLYLPEEKVLPKHSLLYETFAVYNELTKVKFIA--EGLRDYqFLDSGQKKQIVTQLFK--EKR-KVTE | 562 |
| COR24647 | 488 | SAQAFIERMINNDLYLPDQKVLPKHSLLYQKFAVYNELTKIKYVT--ETGEAR-LFDVELKKEIFDGLFK--KER-KVTK | 561 |
| WP_000066813 | 488 | SAEDFINKMTNYDLYLPEEKVLPKHSLLYETFAVYNELTKVKFIA--EGLTRYqFLDKKQKKDIFDTFFKaeNKR-KVTE | 564 |
| WP_009754323 | 488 | SAESFINKMTNYDLYLPEEKVLPKHSLLYETFAVYNELTKVKFIA--EGLRDYqFFDSGQKKQIVNOLFK--EKR-KVTE | 562 |
| WP_044674937 | 487 | SAENFITRMTNYDQYLPDQKVLPKHSLLYEKFAVYNELTKVKFIA--EGMRDYqFLDSGQKKDIVKTLFK--TKR-KVTA | 561 |
| WP_044676715 | 487 | SAENFITRMTNYDQYLPDQKVLPKHSLLYEKFAVYNELTKVRYVT--EQGKSF-FFDANMKQEIFDGVFK--VYR-KVTK | 560 |
| WP_044680361 | 487 | SAENFITRMTNYDQYLPDQKVLPKHSLLYEKFAVYNELTKVRYVT--EQGKSF-FFDANMKQEIFDGVFK--VYR-KVTK | 560 |
| WP_044681799 | 487 | SAENFITRMTNYDQYLPDQKVLPKHSLLYEKFAVYNELTKVKFIA--EGMRDYqFLDSGQKKDIVKTLFK--TKR-KVTA | 561 |
| WP_049533112 | 487 | SAEKFITRMTLNDLYLPEEKVLPKHSLLYETFTVYNELTKVKYVN--EQGEAK-FFDANMKQEIFDHVFK--ENR-KVTK | 560 |
| WP_029090905 | 472 | SSEAFIKRMINKCTYLIHEDVIPKHSFSYAKFEVLNELNKIRLDG------KP--IDIPLKKRIFEGLFL---EKtKVTQ | 540 |
| WP_006506696 | 499 | TAEGFIKRMRSYCTYFPDEEVLPKNSLIVSKYEVYNELNKIRVDD--------kLLEVDVKNDIYNELFM--KNK-TVTE | 567 |
| AIT42264 | 487 | SAQSFIERMTNFDKNLPNEKVLPKHSLLYEYFTVYNELTKVKYVT--EGMRKPaFLSGEQKKAIVDLLFK--TNR-KVTV | 561 |
| WP_034440723 | 494 | SAELFIENLTSRDTYLPDEPVLPKRSLIYQKFTIFNELTKISYID--ERGILQ-NFSSREKIAIFNDLFK---NKsKVTK | 567 |
| AKQ21048 | 487 | SAQSFIERMTNFDKNLPNEKVLPKHSLLYEYFTVYNELTKVKYVT--EGMRKPaFLSGEQKKAIVDLLFK--TNR-KVTV | 561 |
| WP_004636532 | 489 | SAEKFIERMTNMDTYLLEEKVLPKRSLLYQTFEVYNELTKVRYTN--EQGKTE-KLNRQQKAEIIETLFK-qKNR--VRE | 562 |
| WP_002364836 | 496 | SATAFIERMTNFDTYLPSEKVLPKHSLLYEKFMVENELTKISYTD--DRGIKA-NFSGKEKEKIFDYLFK--TRR-KVKK | 569 |
| WP_016631044 | 447 | SATAFIERMTNFDTYLPSEKVLPKHSLLYEKFMVFNELTKISYTD--DRGIKA-NFSGKEKEKIFDYLFK--TRR-KVKK | 520 |
| EMS75795 | 232 | SAMKFIQRMINYDTYLPTEKVLPKHSILYQKYTIFNELTKVAYKD--ERGIKH-QFSSKEKREIFKELFQ--KQR-KVTV | 305 |
| WP_002373311 | 496 | SATAFIERMTNFDTYLPSEKVLPKHSLLYEKFMVFNELTKISYTD--DRGIKA-NFSGKEKEKIFDYLFK--TRR-KVKK | 569 |
| WP_002378009 | 496 | SATAFIERMTNFDTYLPSEKVLPKHSLLYEKFMVFNELTKISYTD--DRGIKA-NFSGKEKEKIFDYLFK--TRR-KVKK | 569 |
| WP_002407324 | 496 | SATAFIERMTNFDTYLPSEKVLPKHSLLYEKFMVFNELTKISYTD--DRGIKA-NFSGKEKEKIEDYLFK--TRR-KVKK | 569 |
| WP_002413717 | 496 | SATAFIERMTNFDTYLPSEKVLPKHSLLYEKFMVFNELTKISYTD--DRGIKA-NFSGKEKEKIFDYLFK--TRR-KVKK | 569 |
| WP_010775580 | 498 | SATAFIERMTNFDTYLPSEKVLPKHSLLYEKFMVFNELTKISYTD--DRGIKA-NFSGKEKEKIFDYLFK--TRR-KVKK | 571 |
| WP_010818269 | 496 | SATAFIERMTNFDTYLPSEKVLPKHSLLYEKFMVFNELTKISYTD--DRGIKA-NFSGKEKEKIFDYLFK--TRR-KVKK | 569 |
| WP_010824395 | 496 | SATAFIERMTNFDTYLPSEKVLPKHSLLYEKFMVENELTKISYTD--DRGIKA-NFSGKEKEKIEDYLFK--TRR-KVKK | 569 |
| WP_016622645 | 496 | SATAFIERMTNFDTYLPSEKVLPKHSLLYEKFMVFNELTKISYTD--DRGIKA-NFSGKEKEKIEDYLFK--TRR-KVKK | 569 |
| WP_033624816 | 496 | SATAFIERMTNFDTYLPSEKVLPKHSLLYEKFMVFNELTKISYTD--DRGIKA-NFSGKEKEKIFDYLFK--TRR-KVKK | 569 |
| WP_033625576 | 496 | SATAFIERMTNFDTYLPSEKVLPKHSLLYEKFMVFNELTKISYTD--DRGIKA-NFSGKEKEKIFDYLFK--TRR-KVKK | 569 |
| WP_033789179 | 496 | SATAFIERMTNFDTYLPSEKVLPKHSLLYEKFMVFNELTKISYTD--DRGIKA-NFSGKEKEKIFDYLFK--TRR-KVKK | 569 |
| WP_002310644 | 493 | SAVRFIERMINTDMYMPHNKVLPKNSLLYQKFSIYNELTKVRYQD--ERGQMN-YFSSIEKKEIFHELFE--KNR-KVTK | 566 |
| WP_002312694 | 494 | SAVRFIERMINTDMYMPHNKVLPKNSLLYQKFSIYNELTKVRYQD--ERGOMN-YFSSIEKKEIFHELFE--KNR-KVTK | 567 |
| WP_002314015 | 494 | SAVRFIERMNNTDMYIPHNKVLPKNSLLYQKFSIYNELTKVRYQD--ERGOMN-YFSSIEKKEIFHELFE--KNR-KVTK | 567 |
| WP_002320716 | 494 | SAVRFIERMINTDMYIPHNKVLPKNSLLYQKFSIYNELTKVRYQD--ERGOMN-YFSSIEKKEIFHELFE--KNR-KVTK | 567 |
| WP_002330729 | 493 | SAVRFIERMINTDMYIPHNKVLPKNSLLYQKFSIYNELTKVRYQD--ERGOMN-YFSSIEKKEIFHELFE--KNR-KVTK | 566 |
| WP_002335161 | 494 | SAVRFIERMINTDMYMPHNKVLPKNSLLYQKFSIYNELTKVRYQD--ERGOMN-YFSSIEKKEIFHELFE--KNR-KVTK | 567 |
| WP_002345439 | 494 | SAVRFIERMINTDMYIPHNKVLPKNSLLYQKFSIYNELTKVRYQD--ERGOMN-YFSSIEKKEIFHELFE--KNR-KVTK | 567 |
| WP_034867970 | 487 | SAMRFIQRMTKQDTYLPTEKVLPKNSLLYQKYMIFNELTKVSYKD--ERGVKQ-YFSGDEKQQIFKOLFQ--KERgKITV | 561 |
| WP_047937432 | 494 | SAVRFIERMINTDMYMPHNKVLPKNSLLYQKFSIYNELTKVRYQD--ERGOMN-YFSSIEKKEIFHELFE--KNR-KVTK | 567 |
| WP_010720994 | 487 | SAMRFIQRMTKQDTYLPTEKVLPKNSLFYQKYMIFNELTKVSYKD--ERGVKQ-YFSGDEKQQIFKOLFQ--KERgKITV | 561 |
| WP_010737004 | 487 | SAMRFIQRMTKQDTYLPTEKVLPKNSLLYQKYMIFNELTKVSYKD--ERGVKQ-YFSGDEKQQIFKOLFQ--KERgKITV | 561 |
| WP_034700478 | 487 | SAMRFIQRMTKQDTYLPTEKVLPKNSLLYQKYMIFNELTKVSYKD--ERGVKQ-YFSGDEKQQIFKOLFQ--KERgKITV | 561 |
| WP_007209003 | 491 | SAVAFIERMTIKDIYL-NENVLPRHSLIYEKFTVFNELTKVLYAD--DRGVFQ-RFSAEEKEDIFEKLFK--SER-KVTK | 563 |
| WP_023519017 | 486 | SAIEFIERMTNQDTYLPKEKVLPKQSLIYORFMIFNELTKVSYTD--ERGKSH-YFSSEQKRKIFNELFK--QHP-RVTE | 559 |
| WP_010770040 | 490 | SATKFIERMTNFDTYLPTEKVLPKHSMIYEKYMVYNELTKVSYVD--ERGMNQ-RFSGEEKKQIVEELFK--QSR-KVTK | 563 |
| WP_048604708 | 486 | SAELFIERMTNFDLYLPSEKVLPKHSMLYEKYTVYNELTKVTYKD--EQGKVQ-NFSSEEKERIFIDLFK--QHR-KVTK | 559 |
| WP_010750235 | 487 | SATKFIQRMINYDTYLPTEKVLPKYSMLYQKYTIFNELTKVAYKD--DRGIKH-QFSSEEKLRIFQELFK--KQR-RVTK | 560 |
| AII16583 | 526 | SAQSFIERMTNFDKNLPNEKVLPKHSLLYEYFTVYNELTKVKYVT--EGMRKPaFLSGEQKKAIVDLLFK--TNR-KVTV | 600 |
| WP_029073316 | 507 | TADEFIKRMRNFCTYFPDEPVLAKNSLTVSKYEVLNEINKLRIND--------hLIKRDIKDKMLHTLFM--DHK-SISA | 575 |
| WP_031589969 | 507 | TADEFIKRMRNFCTYFPDEPVMAKNSLTVSKYEVLNEINKLRIND--------hLIKRDMKDKMLHTLFM--DHK-SISA | 575 |
| KDA45870 | 485 | SAEDFIKRMTINDLYLPTEPVLPKHSLLYERYTIFNELAGVRYVT--ENGEAK-YFDAQTKRSIFE-LFK1--DR-KVSE | 557 |
| WP_039099354 | 510 | SANEFIKRMTTTDTYLLAEDVLPKQSLIYQRFEVLNELNGLKIDD--QPITTE------LKQAIFTDLFM---QKtSVTV | 578 |
| AKP02966 | 484 | SSNKFIRRMTVTDSYLVGEPVLPKNSLIYQRYEVLNELNNIRITEn1KTNPTGSRLTVETKQHIYNELFK--NYK-KITV | 560 |
| WP_010991369 | 493 | SAVDFIEKMTNKDTYLPKENVLPKHSLCYQKYLVYNELTKVRYIN--DOGKTS-YFSGQEKEQIFNDLFK--QKR-KVKK | 566 |
| WP_033838504 | 493 | SAVDFIEKMTNKDTYLPKENVLPKHSLCYQKYLVYNELTKVRYIN--DQGKTS-YFSGQEKEQIFNDLFK--QKR-KVKK | 566 |
| EHN60060 | 496 | SAVDFIEKMTNKDTYLPKENVLPKHSLCYQKYLVYNELTKVRYIN--DOGKTS-YFSGQEKEQIFNDLFK--QKR-KVKK | 569 |
| EFR89594 | 262 | SAVDFIEKMTNKDTYLPKENVLPKHSLCYQKYLVYNELTKVRYIN--DOGKTS-YFSGQEKEQIFNDLFK--QKR-KVKK | 335 |
| WP_038409211 | 493 | SAIDFIEKMTNKDTYLPKENVLPKHSLCYQKYMVYNELTKIRYID--DQGKTH-HFSGQEKQQIFNGLFK--QQR-KVKK | 566 |
| EFR95520 | 112 | SAIDFIEKMTNKDTYLPKENVLPKHSLCYQKYMVYNELTKIRYID--DOGKTH-HFSGQEKQQIFNGLFK--QQR-KVKK | 185 |
| WP_003723650 | 493 | SAVDFIEKMTNKDTYLPKENVLPKHSLCYQKYMVYNELTKIRYID--DQGKTN-YFSGREKQQVENDLFK--QKR-KVKK | 566 |
| WP_003727705 | 493 | SAVDFIEKMTNKDTYLPKENVLPKHSLCYQKYMVYNELTKIRYID--DOGKIN-YFSGREKQQIFNDLFK--QKR-KVKK | 566 |
| WP_003730785 | 493 | SAVDFIEKMTNKDTYLPKENVLPKHSLCYQKYMVYNELTKIRYID--DOGKTN-YFSGREKQQIFNDLFK--QKR-KVKK | 566 |
| WP_003733029 | 493 | SAVDFIEKMTNKDTYLPKENVLPKHSLCYQKYMVYNELTKVRYID--DOGKTN-YFSGQEKQQIFNDLFK--QKR-KVKK | 566 |
| WP_003739838 | 493 | SAVDFIEKMTNKDTYLPKENVLPKHSLYYQKYMVYNELTKVRYID--DOGKTN-YFSGQEKQQIFNDYFK--QKR-KVSK | 566 |
| WP_014601172 | 493 | SAVDFIEKMTNKDTYLPKENVLPKHSLCYQKYMVYNELTKVRYID--DOGKTN-YFSGQEKQQIFNDLFK--QKR-KVKK | 566 |
| WP_023548323 | 493 | SAVDFIEKMTNKDTYLPKENVLPKHSLCYQKYMVYNELTKIRYID--DQGKTN-YFSGQEKQQIFNDLFK--QKR-KVKK | 566 |
| WP_031665337 | 493 | SAVDFIEKMTNKDTYLPKENVLPKHSLCYQKYMVYNELTKVRYID--DOGKTN-YFSGQEKQQIFNDLFK--QKR-KVKK | 566 |
| WP_031669209 | 493 | SAVDFIEKMTNKDTYLPKENVLPKHSLCYQKYMVYNELTKVRYID--DOGKTN-YFSGQEKQQIFNDLFK--QKR-KVKK | 566 |
| WP_033920898 | 493 | SAVDFIEKMTNKDTYLPKENVLPKHSLCYQKYMVYNELTKIRYID--DOGKTN-YFSGQEKQQIFNDLFK--QKR-KVKK | 566 |
| AKI42028 | 496 | SAVDFIEKMTNKDTYLPKENVLPKHSLCYQKYMVYNELTKVRYID--DOGKTN-YFSGQEKQQIFNDLFK--QKR-KVKK | 569 |
| AKI50529 | 496 | SAVDFIEKMTNKDTYLPKENVLPKHSLCYQKYMVYNELTKIRYID--DOGKTN-YFSGQEKQQIFNDLFK--QKR-KVKK | 569 |
| EFR83390 | 1 | ---------------------------------------------------------------IFNDLFK--QKR-KVKK | 14 |
| WP_046323366 | 493 | SAIDFIEKMTNKDTYLPKENVLPKHSMCYQKYMVYNELTKIRYTD--DQGKTH-YFSGQEKQQIFNDLFK--QKR-KVKK | 566 |
| AKE81011 | 503 | SAQSFIERMTNFDKNLPNEKVLPKHSLLYEYFTVYNELTKVKYVT--EGMRKPaFLSGEQKKAIVDLLFK--TNR-KVTV | 577 |
| CUO82355 | 503 | TAEGFIKRMRSYCTYFPDEEVLPKNSLIVSKYEVYNELNKIRVDD--------kLLEVDVKNDIYNELFM--KNK-TVTE | 571 |
| WP_033162887 | 504 | TAEGFIERMKNTGTYFPDEPVMAKNSLTVSKFEVLNELNKIRING--------kLIAVETKKELLSDLFM--KNK-TITD | 572 |
| AGZ01981 | 520 | SAQSFIERMTNFDKNLPNEKVLPKHSLLYEYFTVYNELTKVKYVT--EGMRKPaFLSGEQKKAIVDLLFK--TNR-KVTV | 594 |
| AKA60242 | 487 | SAQSFIERMTNFDKNLPNEKVLPKHSLLYEYFTVYNELTKVKYVT--EGMRKPaFLSGEQKKAIVDLLFK--TNR-KVTV | 561 |
| AKS40380 | 487 | SAQSFIERMTNFDKNLPNEKVLPKHSLLYEYFTVYNELTKVKYVT--EGMRKPaFLSGEQKKAIVDLLFK--TNR-KVTV | 561 |
| 4UN5_B | 491 | SAQSFIERMTNFDKNLPNEKVLPKHSLLYEYFTVYNELTKVKYVT--EGMRKPaFLSGEQKKAIVDLLFK--TNR-KVTV | 565 |
| WP_010922251 | 562 | KOLKEDYFKK--IECFDSVEISGVEDR---FNASLGTYHDLLKIIKDK DELDNEENEDILEDIVLTLTLFEDREMIE | 633 |
| WP_039695303 | 564 | EKLLNYLNKE--FPEYRIKDLIGLDKEnkSFNASLGTYHDLKKIL-DK AFLDDKVNEEVIEDIIKTLTLFEDKDMIH | 637 |
| WP_045635197 | 562 | KDIIHYLHN---VDGYDGIELKGIEKQ---FNASLSTYHDLLKIIKDK EFMDDAKNEAILENIVHTLTIFEDREMIK | 632 |
| 5AXW_A | 300 | KQIAKEILVNe--EDIKGYRVTSTGKPe---FTNLKVYHDIKDITARK ------ENAELLDQIAKILTIYQSSEDIQ | 368 |
| WP_009880683 | 246 | KOLKEDYFKK--IECFDSVEISGVEDR---FNASLGTYHDLLKIIKDK DFLDNEENEDILEDIVLTLTLFEDREMIE | 317 |
| WP_010922251 | 562 | KOLKEDYFKK--IECFDSVEISGVEDR---FNASLGTYHDLLKIIKDK DELDNEENEDILEDIVLTLTLFEDREMIE | 633 |
| WP_011054416 | 562 | KOLKEDYFKK--IECFDSVEISGVEDR---FNASLGTYHDLLKIIKDK DFLDNEENEDILEDIVLTLTLFEDREMIE | 633 |
| WP_011284745 | 562 | KOLKEDYFKK--IECFDSVEISGVEDR---FNASLGTYHDLLKIIKDK DFLDNEENEDILEDIVLTLTLFEDREMIE | 633 |
| WP_011285506 | 562 | KOLKEDYFKK--IECFDSVEISGVEDR---FNASLGTYHDLLKIIKDK DFLDNEENEDILEDIVLTLTLFEDREMIE | 633 |
| WP_011527619 | 562 | KOLKEDYFKK--IECFDSVEISGVEDR---FNASLGTYHDLLKIIKDK DFLDNEENEDILEDIVLTLTLFEDREMIE | 633 |
| WP_012560673 | 562 | KOLKEDYFKK--IECFDSVEISGVEDR---FNASLGTYHDLLKIIKDK DFLDNEENEDILEDIVLTLTLFEDREMIE | 633 |
| WP_014407541 | 562 | KOLKEDYFKK--IECFDSVEISGVEDR---FNASLGAYHDLLKIIKDK DFLDNEENEDILEDIVLTLTLFEDRGMIE | 633 |
| WP_020905136 | 562 | KOLKEDYFKK--IECFDSVEISGVEDR---FNASLGTYHDLLKIIKDK DFLDNEENEDILEDIVLTLTLFEDREMIE | 633 |
| WP_023080005 | 562 | KOLKEDYFKK--IECFDSVEISGVEDR---FNTSLGTYHDLLKIIKDK DFLDNEENEDILEDIVLTLTLFEDKEMIE | 633 |
| WP_023610282 | 562 | KOLKEDYFKK--IECFDSVEISGVEDR---FNTSLGTYHDLLKIIKDK DFLDNEENEDILEDIVLTLTLFEDKEMIE | 633 |
| WP_030125963 | 562 | KOLKEDYFKK--IECFDSVEISGVEDR---FNASLGTYHDLLKIIKDK DELDNEENEDILEDIVLTLTLFEDREMIE | 633 |
| WP_030126706 | 562 | KOLKEDYFKK--IECFDSVEISGVEDR---FNASLGTYHDLLKIIKDK DELDNEENEDILEDIVLTLTLFEDREMIE | 633 |
| WP_031488318 | 562 | KOLKEDYFKK--IECFDSVEISGVEDR---FNASLGTYHDLLKIIKDK DFLDNEENEDILEDIVLTLTLFEDREMIE | 633 |
| WP_032460140 | 562 | KOLKEDYFKK--IECFDSVEISGVEDR---FNASLGTYHDLLKIIKDK DELDNEENEDILEDIVLTLTLFEDREMIE | 633 |
| WP_032461047 | 562 | KQLKEDYFKK--IECFDSVEISGVEDR---FNASLGTYHDLLKIIKDK DELDNEENEDILEDIVLTLTLFEDREMIE | 633 |
| WP_032462016 | 562 | KOLKEDYFKK--IECFDSVEISGVEDR---FNASLGTYHDLLKIIKDK DFLDNEENEDILEDIVLTLTLFEDREMIE | 633 |
| WP_032462936 | 562 | KOLKEDYFKK--IECFDSVEISGVEDR---FNASLGTYHDLLKIIKDK DELDNEENEDILEDIVLTLTLFEDKEMIE | 633 |
| WP_032464890 | 562 | KOLKEDYFKK--IECFDSVEISGVEDR---FNASLGTYHDLLKIIKDK DFLDNEENEDILEDIVLTLTLFEDREMIE | 633 |
| WP_033888930 | 387 | KOLKEDYFKK--IECFDSVEISGVEDR---FNASLGTYHDLLKIIKDK DFLDNEENEDILEDIVLTLTLFEDREMIE | 458 |
| WP_038431314 | 562 | KOLKEDYFKK--IECFDSVEISGVEDR---FNASLGTYHDLLKIIKDK DFLDNEENEDILEDIVLTLTLFEDREMIE | 633 |
| WP_038432938 | 562 | KOLKEDYFKK--IECFDSVEISGVEDR---FNTSLGTYHDLLKIIKDK DELDNEENEDILEDIVLTLTLFEDKEMIE | 633 |
| WP_038434062 | 562 | KOLKEDYFKK--IECFDSVEISGVEDR---FNASLGTYHDLLKIIKDK DFLDNEENEDILEDIVLTLTLFEDREMIE | 633 |
| BAQ51233 | 473 | KOLKEDYFKK--IECFDSVEISGVEDR---FNASLGTYHDLLKIIKDK DFLDNEENEDILEDIVLTLTLFEDREMIE | 544 |
| KGE60162 | | ------------------------------------------------ ----------------------------- | |
| KGE60856 | | ------------------------------------------------ ----------------------------- | |
| WP_002989955 | 562 | KOLKEDYFKK--IECFDSVEISGVEDR---FNASLGTYHDLLKIIKDK DFLDNEENEDILEDIVLTLTLFEDREMIE | 633 |
| WP_003030002 | 561 | DKLLNYLNKE--FEEFRIVNLTGLDKEnkAFNSSLGTYHDLRKIL-DK SFLDDKANEKTIEDIIQTLTLFEDREMIR | 634 |
| WP_003065552 | 564 | EKLLNYLNKE--FPEYRIKDLIGLDKEnkSFNASLGTYHDLKKIL-DK AFLDDKVNEEVIEDIIKTLTLFEDKDMIH | 637 |
| WP_001040076 | 563 | KDIISFLNK---VDGYEGIAIKGIEKQ---FNASLSTYHDLKKIL-GK DFLDNTDNELILEDIVQTLTLFEDREMIK | 632 |
| WP_001040078 | 562 | KKLLDFLAKE--YEEFRIVDVIGLDKEnkAFNASLGTYHDLEKIL-DK DFLDNPDNESILEDIVOTLTLFEDREMIK | 635 |
| WP_001040080 | 562 | KKLLDFLAKE--YEEFRIVDVIGLDKEnkAFNASLGTYHDLEKIL-DK DFLDNPDNESILEDIVQTLTLFEDREMIK | 635 |
| WP_001040081 | 562 | KKLLDFLAKE--YEEFRIVDVIGLDKEnkAFNASLGTYHDLEKIL-DK DELDNPDNESILEDIVOTLTLFEDREMIK | 635 |
| WP_001040083 | 562 | KKLLDFLAKE--YEEFRIVDVIGLDKEnkAFNASLGTYHDLEKIL-DK DELDNPDNESILEDIIQTLTLFEDREMIK | 635 |
| WP_001040085 | 562 | KKLLDFLAKE--YEEFRIVDVIGLDKEnkAFNASLGTYHDLEKIL-DK DFLDNPDNESILEDIVQTLTLFEDREMIK | 635 |
| WP_001040087 | 562 | KKLLDFLAKE--YEEFRIVDVIGLDKEnkAFNASLGTYHDLEKIL-DK DELDNPDNESILEDIVQTLTLFEDREMIK | 635 |
| WP_001040088 | 562 | KKLLDFLAKE--YEEFRIVDVIGLDKEnkAFNASLGTYHDLEKIL-DK DFLDNPDNESILEDIVQTLTLFEDREMIK | 635 |
| WP_001040089 | 562 | KKLLDFLAKE--YEEFRIVDVIGLDKEnkAFNASLGTYHDLEKIL-DK DFLDNPDNESILEDIVOTLTLFEDREMIK | 635 |
| WP_001040090 | 562 | KKLLDFLAKE--YEEFRIVDVIGLDKEnkAFNASLGTYHDLEKIL-DK DFLDNPDNESILEDIVQTLTLFEDREMIK | 635 |
| WP_001040091 | 562 | KKLLDFLAKE--YEEFRIVDVIGLDKEnkAFNASLGTYHDLEKIL-DK DFLDNPDNESILEDIVQTLTLFEDREMIK | 635 |
| WP_001040092 | 562 | KQLLDFLAKE--FEEFRIVDVTGLDKEnkAFNASLGTYHDLKKIL-DK DFLDNPDNESILEDIVQTITLFEDREMIK | 635 |
| WP_001040094 | 563 | KDIISFLNK---VDGYEGIAIKGIEKQ---FNASLSTYHDLKKIL-GK DFLDNTDNELILEDIVQTLTLFEDREMIR | 632 |
| WP_001040095 | 563 | KDIISFLNK---VDGYEGIAIKGIEKQ---FNASLSTYHDLKKIL-GK DFLDNTDNELILEDIVOTLTLFEDREMIR | 632 |
| WP_001040096 | 563 | KDIISELNK---VDGYEGIAIKGIEKQ---FNASLSTYHDLKKIL-GK DFLDNTDNELILEDIVOTLTLFEDREMIR | 632 |
| WP_001040097 | 563 | KDIISFLNK---VDGYEGIAIKGIEKQ---FNASLSTYHDLKKIL-GK DFLDNTDNELILEDIVQTLTLFEDREMIR | 632 |
| WP_001040098 | 563 | KDIISFLNK---VDGYEGIAIKGIEKQ---FNASLSTYHDLKKIL-GK DFLDNTDNELILEDIVOTLTLFEDREMIR | 632 |
| WP_001040099 | 563 | KDIISFLNK---VDGYEGIAIKGIEKQ---FNASLSTYHDLKKIL-GK DFLDNTDNELILEDIVQTLTLFEDREMIR | 632 |
| WP_001040100 | 563 | KDIISFLNK---VDGYEGIAIKGIEKQ---FNASLSTYHDLKKIL-GK DFLDNTDNELILEDIVQTLTLFEDREMIR | 632 |
| WP_001040104 | 562 | KKLLDFLAKE--YEEFRIVDVIGLDKEnkAFNASLGTYHDLEKIL-DK DFLDNPDNESILEDIVQTLTLFEDREMIK | 635 |
| WP_001040105 | 562 | KKLLDFLAKE--YEEFRIVDVIGLDKEnkAFNASLGTYHDLEKIL-DK DFLDNPDNESILEDIVOTLTLFEDREMIK | 635 |
| WP_001040106 | 562 | KKLLDFLAKE--YEEFRIVDVIGLDKEnkAFNASLGTYHDLKKIL-DK DFLDNPDNESILEDIVQTLTLFEDREMIK | 635 |
| WP_001040107 | 562 | KKLLDFLAKE--YEEFRIVDVIGLDKEnkAFNASLGTYHDLKKIL-DK DELDNPDNESILEDIVQTLTLFEDREMIK | 635 |
| WP_001040108 | 562 | KKLLDFLAKE--YEEFRIVDVIGLDKEnkAFNASLGTYHDLKKIL-DK DELDNPDNESILEDIVOTLTLFEDREMIK | 635 |
| WP_001040109 | 562 | KKLLDFLAKE--YEEFRIVDVIGLDKEnkAFNASLGTYHDLKKIL-DK DELDNPDNESILEDIVQTLTLFEDREMIK | 635 |
| WP_001040110 | 562 | KKLLDFLAKE--YEEFRIVDVIGLDKEnkAFNASLGTYHDLKKIL-DK DFLDNPDNESILEDIVQTLTLFEDREMIK | 635 |
| WP_015058523 | 562 | KOLLDFLAKE--FEEFRIVDVTGLDKEnkAFNASLGTYHDLKKIL-DK DFLDNPDNESILEDIVQTITLFEDREMIK | 635 |
| WP_017643650 | 563 | KDIISFLNK---VDGYEGIAIKGIEKQ---FNASLSTYHDLKKIL-GK DELDNTDNELILEDIVOTLTLFEDREMIR | 632 |
| WP_017647151 | 562 | KKLLDFLAKE--YEEFRIVDVIGLDKEnkAFNASLGTYHDLKKIL-DK DELDNPDNESILEDIVOTLTLFEDREMIK | 635 |
| WP_017648376 | 562 | KKLLDFLAKE--YEEFRIVDVIGLDKEnkAFNASLGTYHDLKKIL-DK DELDNPDNESILEDIVOTLTLFEDREMIK | 635 |
| WP_017649527 | 562 | KKLLDFLAKE--YEEFRIVDVIGLDKEnkAFNASLGTYHDLEKIL-DK DFLDNPDNESILEDIVOTLTLFEDREMIK | 635 |
| WP_017771611 | 562 | KKLLDFLAKE--YEEFRIVDVIGLDKEnkAFNASLGTYHDLKKIL-DK DFLDNPDNESILEDIVOTLTLFEDREMIK | 635 |
| WP_017771984 | 562 | KKLLDFLAKE--YEEFRIVDVIGLDKEnkAFNASLGTYHDLEKIL-DK DFLDNPDNESILEDIVOTLTLFEDREMIK | 635 |
| CFQ25032 | 562 | KKLLDFLAKE--YEEFRIVDVIGLDKEnkAFNASLGTYHDLEKIL-DK DFLDNPDNESILEDIVQTLTLFEDREMIK | 635 |
| CFV16040 | 562 | KKLLDFLAKE--YEEFRIVDVIGLDKEnkAFNASLGTYHDLEKIL-DK DFLDNPDNESILEDIVQTLTLFEDREMIK | 635 |
| KLJ37842 | 562 | KKLLDFLAKE--YEEFRIVDVIGLDKEnkAFNASLGTYHDLEKIL-DK DFLDNPDNESILEDIVOTLTLFEDREMIK | 635 |
| KLJ72361 | 562 | KKLLDFLAKE--YEEFRIVDVIGLDKEnkAFNASLGTYHDLEKIL-DK DFLDNPDNESILEDIVOTLTLFEDREMIK | 635 |
| KLL20707 | 562 | KKLLDFLAKE--YEEFRIVDVIGLDKEnkAFNASLGTYHDLEKIL-DK DFLDNPDNESILEDIVOTLTLFEDREMIK | 635 |
| KLL42645 | 562 | KKLLDFLAKE--YEEFRIVDVIGLDKEnkAFNASLGTYHDLKKIL-DK DFLDNPDNESILEDIVOTLTLFEDREMIK | 635 |
| WP_047207273 | 562 | KKLLDFLAKE--YEEFRIVDVIGLDKEnkAFNASLGTYHDLEKIL-DK DFLDNPDNESILEDIVOTLTLFEDREMIK | 635 |
| WP_047209694 | 563 | KDIISFLNK---VDGYEGIAIKGIEKQ---FNASLSTYHDLKKIL-GK DFLDNTDNELILEDIVQTLTLFEDREMIR | 632 |
| WP_050198062 | 562 | KKLLDFLAKE--YEEFRIVDVIGLDKEnkAFNASLGTYHDLEKIL-DK DFLDNPDNESILEDIVQTLTLFEDREMIK | 635 |
| WP_050201642 | 562 | KKLLDFLAKE--YEEFRIVDVIGLDKEnkAFNASLGTYHDLEKIL-DK DFLDNPDNESILEDIVQTLTLFEDREMIK | 635 |
| WP_050204027 | 562 | KKLLDFLAKE--YEEFRIVDVIGLDKEnkAFNASLGTYHDLKKIL-DK DFLDNPDNESILEDIVOTLTLFEDREMIK | 635 |
| WP_050881965 | 562 | KKLLDFLAKE--YEEFRIVDVIGLDKEnkAFNASLGTYHDLEKIL-DK DFLDNPDNESILEDIVQTLTLFEDREMIK | 635 |
| WP_050886065 | 562 | KKLLDFLAKE--YEEFRIVDVIGLDKEnkAFNASLGTYHDLEKIL-DK DFLDNPDNESILEDIVQTLTLFEDREMIK | 635 |
| AHN30376 | 562 | KOLLDFLAKE--FEEFRIVDVTGLDKEnkAFNASLGTYHDLKKIL-DK DFLDNPDNESILEDIVQTITLFEDREMIK | 635 |
| EAO78426 | 562 | KKLLDFLAKE--YEEFRIVDVIGLDKEnkAFNASLGTYHDLEKIL-DK DFLDNPDNESILEDIVQTLTLFEDREMIK | 635 |
| CCW42055 | 562 | KQLLDFLAKE--FEEFRIVDVTGLDKEnkAFNASLGTYHDLEKIL-GK DFLDNPDNESILEDIVQTLTLFEDREMIK | 635 |
| WP_003041502 | 561 | DKLLNYLNKE--FEEFRIVNLTGLDKEnkVFNSSLGTYHDLRKIL-NK SFLDNKENAQIIEDIIQTLTLFEDREMIR | 634 |
| WP_037593752 | 562 | DKLLNYLNKE--FEEFRIVNLTGLDKEnkAFNSSLGTYHDLRKIL-DK SFLDDKANEKTIEDIIQTLTLFEDREMIR | 635 |
| WP_049516684 | 562 | DKLLNYLNKE--FEEFRIVNLTGLDKEnkAFNASLGTYHDLRKIL-DK SFLDDKVNEKIIEDIIQTLTLFEDREMIR | 635 |
| GAD46167 | 561 | DKLLNYLNKE--FEEFRIVNLTGLDKEnkAFNSSLGTYHDLRKIL-DK SFLDDKANEKTIEDIIQTLTLFEDREMIR | 634 |
| WP_018363470 | 562 | EKLLNYLDKE--FPEYRIQDLVGLDKEnkSFNASLGTYHDLKKIL-DK SFLDDKVNEEVIEDIIKTLTLFEDREMIQ | 635 |
| WP_003043819 | 572 | KOLKEDYFKK--IECFDSVEIIGVEDR---FNASLGTYHDLLKIIKDK DELDNEENEDILEDIVLTLTLFEDREMIE | 643 |
| WP_006269658 | 561 | DKLLNYLNKE--FEEFRIVNLTGLDKEnkAFNSSLGTYHDLRKIL-DK SFLDDKANEKTIEDIIQTLTLFEDREMIR | 634 |
| WP_048800889 | 561 | DKLLNYLDKE--FDEFRIVDLTGLDKEnkAFNASLGTYHDLRKIL-DK SFLDDKANEKTIEDIIQTLTLFEDREMIR | 634 |
| WP_012767106 | 562 | KQLKEDYFKK--IECFDSVEISGVEDR---FNASLGTYHDLLKIIKDK DELDNEENEDILEDIVLTLTLFEDKEMIE | 633 |
| WP_014612333 | 562 | KOLKEDYFKK--IECFDSVEISGVEDR---FNASLGTYHDLLKIIKDK DFLDNEENEDILEDIVLTLTLFEDKEMIE | 633 |
| WP_015017095 | 562 | KOLKEDYFKK--IECFDSVEISGVEDR---FNASLGTYHDLLKIIKDK DFLDNEENEDILEDIVLTLTLFEDKEMIE | 633 |
| WP_015057649 | 562 | KOLKEDYFKK--IECFDSVEISGVEDR---FNASLGTYHDLLKIIKDK DELDNEENEDILEDIVLTLTLFEDKEMIE | 633 |
| WP_048327215 | 562 | KOLKEDYFKK--IECFDSVEISGVEDR---FNASLGTYHDLLKIIKDK DELDNEENEDILEDIVLTLTLFEDKEMIE | 633 |
| WP_049519324 | 562 | KOLKEDYFKK--IECFDSVEISGVEDR---FNASLGTYHDLLKIIKDK DELDNEENEDILEDIVLTLTLFEDKEMIE | 633 |
| WP_012515931 | 562 | KQLKENYFKK--IECWDSVEITGVEDS---FNASLGTYHDLLKIIQDK DFLDNPDNQKIIEDIILTLTLFEDKKMIS | 633 |
| WP_021320964 | 562 | KOLKENYFKK--IECWDSVEITGVEDS---FNASLGTYHDLLKIIQDK DFLDNPDNOKIIEDIILTLTLFEDKKMIS | 633 |
| WP_037581760 | 562 | KOLKENYFKK--IECWDSVEITGVEDS---FNASLGTYHDLLKIIQDK DFLDNPDNOKIIEDIILTLTLFEDKKMIS | 633 |
| WP_004232481 | 561 | AKLLSYLNNE--FEEFRINDLIGLDKDskSFNASLGTYHDLKKIL-DK SFLDDKTNEQIIEDIVLTLTLFEDRDMIH | 634 |
| WP_009854540 | 562 | EKLLNYLNKE--FPEYRIKDLIGLDKEnkSFNASLGTYHDLKKIL-DK AFLDDKVNEEVIEDIIKTLTLFEDKDMIH | 635 |
| WP_012962174 | 562 | DKFLNYLNKE--FPEYRIQDLIGLDKEnkSFNASLGTYHDLKKIL-DK SFLDDKTNETIIEDIIQTLTLFEDRDMIR | 635 |
| WP_039695303 | 564 | EKLLNYLNKE--FPEYRIKDLIGLDKEnkSFNASLGTYHDLKKIL-DK AFLDDKVNEEVIEDIIKTLTLFEDKDMIH | 637 |
| WP_014334983 | 561 | AKLLSYLNNE--FEEFRINDLIGLDKDskSFNASLGTYHDLKKIL-DK SFLDDKINGQIIEDIVLTLTLFEDRDMIH | 634 |
| WP_003099269 | 562 | KOLKEEYFSK--MKCFHTVTILGVEDR---FNASLGTYHDLLKIFKDK AFLDDEANQDILEEIVWTLTLFEDQAMIE | 633 |
| AHY15608 | 562 | KQLKEEYFSK--MKCFHTVTILGVEDR---FNASLGTYHDLLKIFKDK AFLDDEANQDILEEIVWTLTLFEDQAMIE | 633 |
| AHY17476 | 562 | KQLKEEYFSK--MKCFHTVTILGVEDR---FNASLGTYHDLLKIFKDK AFLDDEANQDILEEIVWTLTLFEDQAMIE | 633 |
| ESR09100 | | ------------------------------------------------ ----------------------------- | |
| AGM98575 | 562 | KOLKEEYFSK--MKCFHTVTILGVEDR---FNASLGTYHDLLKIFKDK AFLDDEANQDILEEIVWTLTLFEDQAMIE | 633 |
| ALF27331 | 561 | DKLMDFLEKE--FDEFRIVDLTGLDKEnkAFNASYGTYHDLRKIL-DK DELDNSKNEKILEDIVLTLTLFEDREMIR | 634 |
| WP_018372492 | 574 | RKLKDFIEKElgYGYIDIDNIKGVEEQ---FNASYTTYQDLLKIIGDK EFLDNEENKDLLEEIIYILTVFEDRKMIE | 647 |
| WP_045618028 | 563 | KDIIQYLHN---VDSYDGIELKGIEKQ---FNASLSTYHDLLKIIKDK EFMDDSKNEAILENIVHTLTIFEDREMIK | 633 |
| WP_045635197 | 562 | KDIIHYLHN---VDGYDGIELKGIEKQ---FNASLSTYHDLLKIIKDK EFMDDAKNEAILENIVHTLTIFEDREMIK | 632 |
| WP_002263549 | 561 | DKLMDFLEKE--FDEFRIVDLTGLDKEnkVFNASYGTYHDLCKIL-DK DFLDNSKNEKILEDIVLTLTLFEDREMIR | 634 |
| WP_002263887 | 561 | DKLMDFLEKE--FDEFRIVDLTGLDKEnkVFNASYGTYHDLCKIL-DK DFLDNSKNEKILEDIVLTLTLFEDREMIR | 634 |
| WP_002264920 | 561 | DKLMDFLEKE--FDEFRIVDLTGLDKEnkAFNASYGTYHDLRKIL-DK DFLDNSKNEKILEDIVLTLTLFEDREMIR | 634 |
| WP_002269043 | 561 | DKLMDFLEKE--FDEFRIVDLTGLDKEnkAFNASYGTYHDLRKIL-DK DFLDNSKNEKILEDIVLTLTLFEDREMIR | 634 |
| WP_002269448 | 561 | DKLMDFLEKE--FDEFRIVDLTGLDKEnkVFNASYGTYHDLCKIL-DK DFLDNSKNEKILEDIVLTLTLFEDREMIR | 634 |
| WP_002271977 | 561 | DKLMDFLEKE--FDEFRIVDLTGLDKEnkVFNASYGTYHDLCKIL-DK DFLDNSKNEKILEDIVLTLTLFEDREMIR | 634 |
| WP_002272766 | 561 | DKLMDFLEKE--FDEFRIVDLTGLDKEnkVFNASYGTYHDLCKIL-DK DELDNSKNEKILEDIVLTLILFEDREMIR | 634 |
| WP_002273241 | 561 | DKLMDFLEKE--FDEFRIVDLTGLDKEnkVENASYGTYHDLCKIL-DK DFLDNSKNEKILEDIVLTLTLFEDREMIR | 634 |
| WP_002275430 | 561 | DKLMDFLEKE--FDEFRIVDLTGLDKEnkAFNASYGTYHDLRKIL-DK DFLDNSKNEKILEDIVLTLTLFEDREMIR | 634 |
| WP_002276448 | 561 | DKLMDFLEKE--FDEFRIVDLTGLDKEnkVFNASYGTYHDLCKIL-DK DFLDNSKNEKILEDIVLTLTLFEDREMIR | 634 |
| WP_002277050 | 561 | KKLRTFLDKN--FDEFRIVDIQGLDKEteTFNASYATYQDLLKVIKDK VEMDNPENAEILENIVLTLTLFEDREMIK | 635 |
| WP_002277364 | 561 | DKLMDFLEKE--FDEFRIVDLTGLDKEnkAFNASYGTYHDLRKIL-DK DELDNSKNEKILEDIVLTLTLFEDREMIR | 634 |
| WP_002279025 | 561 | DKLMDFLEKE--FDEFRIVDLTGLDKEnkAFNASYGTYHDLRKIL-DK DFLDNSKNEKILEDIVLTLTLFEDREMIR | 634 |
| WP_002279859 | 561 | DKLMDFLEKE--FDEFRIVDLTGLDKEnkAFNASYGTYHDLRKIL-DK DFLDNSKNEKILEDIVLTLTLFEDREMIR | 634 |
| WP_002280230 | 561 | DKLMDFLEKE--FDEFRIVDLTGLDKEnkVFNASYGTYHDLCKIL-DK DFLDNSKNEKILEDIVLTLTLFEDREMIR | 634 |
| WP_002281696 | 561 | DKLMDFLEKE--FDEFRIVDLTGLDKEnkAFNASYGTYHDLRKIL-DK DFLDNSKNEKILEDIVLTLTLFEDREMIR | 634 |
| WP_002282247 | 561 | KKLRTFLDKN--FDEFRIVDIQGLDKEteTFNASYATYQDLLKVIKDK VEMDNPENAEILENIVLTLTLFEDREMIK | 635 |
| WP_002282906 | 561 | DKLMDFLEKE--FDEFRIVDLTGLDKEnkVFNASYGTYHDLCKIL-DK DFLDNSKNEKILEDIVLTLTLFEDREMIR | 634 |
| WP_002283846 | 561 | DKLMDFLEKE--FDEFRIVDLTGLDKEnkAFNASYGTYHDLRKIL-DK DFLDNSKNEKILEDIVLTLTLFEDREMIR | 634 |
| WP_002287255 | 561 | DKLMDFLEKE--FDEFRIVDLTGLDKEnkAFNASYGTYHDLRKIL-DK DFLDNSKNEKILEDIVLTLTLFEDREMIR | 634 |
| WP_002288990 | 561 | DKLMDFLEKE--FDEFRIVDLTGLDKEnkAFNASYGTYHDLRKIL-DK DFLDNSKNEKILEDIVLTLTLFEDREMIR | 634 |
| WP_002289641 | 561 | DKLMDFLEKE--FDEFRIVDLTGLDKEnkVFNASYGTYHDLCKIL-DK DFLDNSKNEKILEDIVLTLTLFEDREMIR | 634 |
| WP_002290427 | 561 | DKLMDFLEKE--FDEFRIVDLTGLDKEnkAFNASYGTYHDLRKIL-DK DFLDNSKNEKILEDIVLTLTLFEDREMIR | 634 |
| WP_002295753 | 561 | DKLMDFLEKE--FDEFRIVDLTGLDKEnkVFNASYGTYHDLCKIL-DK DFLDNSKNEKILEDIVLTLTLFEDREMIR | 634 |
| WP_002296423 | 561 | DKLMDFLEKE--FDEFRIVDLTGLDKEnkAFNASYGTYHDLRKIL-DK DFLDNSKNEKILEDIVLTLTLFEDREMIR | 634 |
| WP_002304487 | 571 | DKLLNYLNKE--FEEFRIVNLTGLDKEnkVFNSSLGTYHDLRKIL-NK SFLDNKENEQIIEDIIQTLTLFEDREMIR | 644 |
| WP_002305844 | 561 | DKLMDFLEKE--FDEFRIVDLTGLDKEnkVFNASYGTYHDLCKIL-DK DFLDNSKNEKILEDIVLTLTLFEDREMIR | 634 |
| WP_002307203 | 561 | DKLMDFLEKE--FDEFRIVDLTGLDKEnkAFNASYGTYHDLRKIL-DK DFLDNSKNEKILEDIVLTLTLFEDREMIR | 634 |
| WP_002310390 | 561 | DKLMDFLEKE--FDEFRIVDLTGLDKEnkAFNASYGTYHDLRKIL-DK DFLDNSKNEKILEDIVLTLTLFEDREMIR | 634 |
| WP_002352408 | 561 | DKLMDFLEKE--FDEFRIVDLTGLDKEnkAFNASYGTYHDLRKIL-DK DFLDNSKNEKILEDIVLTLTLFEDREMIR | 634 |
| WP_012997688 | 561 | DKLMDFLEKE--FDEFRIVDLTGLDKEnkAFNASYGTYHDLRKIL-DK DFLDNSKNEKILEDIVLTLTLFEDREMIR | 634 |
| WP_014677909 | 561 | DKLMDFLEKE--FDEFRIVDLTGLDKEnkAFNASYGTYHDLRKIL-DK DFLDNSKNEKILEDIVLILTLFEDREMIR | 634 |
| WP_019312892 | 561 | DKLMDFLEKE--FDEFRIVDLTGLDKEnkAFNASYGTYHDLRKIL-DK DFLDNSKNEKILEDIVLTLTLFEDREMIR | 634 |
| WP_019313659 | 561 | DKLMDFLEKE--FDEFRIVDLTGLDKEnkVFNASYGTYHDLCKIL-DK DFLDNSKNEKILEDIVLTLTLFEDREMIR | 634 |
| WP_019314093 | 561 | DKLMDFLEKE--FDEFRIVDLTGLDKEnkAFNASYGTYHDLRKIL-DK DFLDNSKNEKILEDIVLTLTLFEDREMIR | 634 |
| WP_019315370 | 561 | DKLMDFLEKE--FDEFRIVDLTGLDKEnkAFNASYGTYHDLRKIL-DK DFLDNSKNEKILEDIVLTLTLFEDREMIR | 634 |
| WP_019803776 | 561 | DKLMDFLEKE--FDEFRIVDLTGLDKEnkVFNASYGTYHDLCKIL-DK DFLDNSKNEKILEDIVLTLTLFEDREMIR | 634 |
| WP_019805234 | 561 | DKLMDFLEKE--FDEFRIVDLTGLDKEnkAFNASYGTYHDLRKIL-DK DFLDNSKNEKILEDIVLTLTLFEDREMIR | 634 |
| WP_024783594 | 561 | DKLMDFLEKE--FDEFRIVDLTGLDKEnkVFNASYGTYHDLCKIL-DK DFLDNSKNEKILEDIVLTLTLFEDREMIR | 634 |
| WP_024784288 | 561 | KKLRTFLDKN--FDEFRIVDIQGLDKEteTFNASYATYQDLLKVIKDK VFMDNPENAEILENIVLTLTLFEDREMIK | 635 |
| WP_024784666 | 561 | DKLMDFLEKE--FDEFRIVDLTGLDKEnkAFNASYGTYHDLRKIL-DK DFLDNSKNEKILEDIVLTLTLFEDREMIR | 634 |
| WP_024784894 | 561 | DKLMDFLEKE--FDEFRIVDLTGLDKEnkVFNASYGTYHDLCKIL-DK DFLDNSKNEKILEDIVLTLTLFEDREMIR | 634 |
| WP_024786433 | 561 | KKLRTFLDKN--FDEFRIVDIQGLDKEteTFNASYATYQDLLKVIKDK VFMDNPENAEILENIVLTLTLFEDREMIK | 635 |
| WP_049473442 | 561 | DKLMDFLEKE--FDEFRIVDLTGLDKEnkVFNASYGTYHDLCKIL-DK DELDNSKNEKILEDIVLTLTLFEDREMIR | 634 |
| WP_049474547 | 561 | DKLMDFLEKE--FDEFRIVDLTGLDKEnkVFNASYGTYHDLCKIL-DK DFLDNSKNEKILEDIVLTLTLFEDREMIR | 634 |
| EMC03581 | 554 | DKLMDFLEKE--FDEFRIVDLTGLDKEnkAFNASYGTYHDLRKIL-DK DFLDNSKNEKILEDIVLTLTLFEDREMIR | 627 |
| WP_000428612 | 565 | KDIIQYLHT---VDGYDGIELKGIEKQ---FNASLSTYHDLLKIIKDK EFMDDPNNEEILENIVHTLTIFEDREMIK | 635 |
| WP_000428613 | 563 | KDIIQFLHN---VDGYDGIELKGIEKQ---FNASLSTYHDLLKIIKDK EFMDDSKNEEILENIVHTLTIFEDREMIK | 633 |
| WP_049523028 | 562 | KDIIHYLHN---VDGYDGIELKGIEKH---FNSSLSTYHDLLKIIKDK EFMDDPKNEEIFENIVHTLTIFEDRVMIK | 632 |
| WP_003107102 | 531 | KOLKENYFNK--IRCLDSITISGVEDK---FNASLGTYHDLLNIIKNQ KILDDEQNQDSLEDIVLTLTLFEDEKMIA | 602 |
| WP_054279288 | 564 | KOLKEDFFSK--IECFDTVDISGVEDK---FNASLGTYHDLLKIIKDK AFLDNSENENIIEDIILTLTLFEDKEMIA | 635 |
| WP_049531101 | 563 | KDLIHYLHN---VDGYDGIELKGIEKQ---FNASLSTYHDLLKIIKDK RFMDEPKNQEILENIVHTLTIFEDREMIK | 633 |
| WP_049538452 | 563 | KDIIQYLHN---VDGYDGIELKGIEKQ---FNASLSTYHDLLKIIKDK EFMDDSKNEEILENIVHTLTIFEDREMIK | 633 |
| WP_049549711 | 563 | KDIIHYLHT---VDGYDGIELKGIEKQ---FNASLSTYHDLLKIIKDK EFMDDSKNEAILENIVHTLTIFEDREMIK | 633 |
| WP_007896501 | 565 | KDLKEKYFSQ--IEGLENVDVTGVEGA---FNASLGTYNDLLKIIKDK AFLDDEANAEILEEIVLILTLFQDEKLIE | 636 |
| EFR44625 | 517 | KDLKEKYFSQ--IEGLENVDVTGVEGA---FNASLGTYNDLLKIIKDK AFLDDEANAEILEEIVLILTLFQDEKLIE | 588 |
| WP_002897477 | 562 | KDIIHYLHN---VDGYDGIELKGIEKQ---FNANLSTYHDLLKITKDK EFMDDPKNEEILENIVHTLTIFEDREMIK | 632 |
| WP_002906454 | 562 | KDIIHYLHN---VDGYDGIELKGIEKQ---FNASLSTYHDLLKIIKDK EFMDNPKNGEILENIIHTLTIFEDREMIK | 632 |
| WP_009729476 | 563 | KDIIQFLHN---VDGYDGIELKGIEKQ---FNASLSTYHDLLKIIKDK AFMDDAKNEAILENIVHTLTIFEDREMIK | 633 |
| CQR24647 | 562 | KKILNFLDKN--FDEFRITDIQGLDNEtgNFNASYGTYHDLLKIIGDK EFMDSSDNVDVLEDIVLSLTLFEDREMIK | 636 |
| WP_000066813 | 565 | KDIIHYLHN---VDGYDGIELKGIEKQ---FNASLSTYHDLLKIIKDK AFMDDSKNEEILENIIHTLTIFEDREMIK | 635 |
| WP_009754323 | 563 | KDIIHYLHN---VDGYDGIELKGIEKQ---FNASLSTYHDLLKIIKDK EFMDNHKNQEILENIVHTLTIFEDREMIK | 633 |
| WP_044674937 | 562 | KDIKAYL-EN--SNGYAGVELKGLEEQ---FNASLPTYHDLLKILRDK AFIDAEENQEILEDIVLTLTLFEDREMIR | 632 |
| WP_044676715 | 561 | EKLMDFLGKE--FDEFRIVDLLGLDKDnkSFNASLGTYHDLKKIV-SK DLLDNPENEDILENVVLTLTLFEDREMIR | 634 |
| WP_044680361 | 561 | EKLMDFLGKE--FDEFRIVDLLGLDKDnkSFNASLGTYHDLKKIV-SK DLLDNPENEDILENVVLTLTLFEDREMIR | 634 |
| WP_044681799 | 562 | KDIKAYL-EN--SNGYAGVELKGLEEQ---FNASLPTYHDLLKILRDK AFIDAEENQEILEDIVLTLTLFEDREMIR | 632 |
| WP_049533112 | 561 | DKLLNYLGKE--FDEFRIVDLTGLDKEnkVFNSSLGTYHDLRKIL-DK SFLDNKENEQIIEDIIQTLTLFEDREMIR | 634 |
| WP_029090905 | 541 | TSLKKWLAEH---EHMTVSVVQGTQKEt-EFATSLQAFHRFVKIF-DR ETVSNPANEEMFEKIIYWSTVFEDKKIMR | 612 |
| WP_006506696 | 568 | KKLKNWLVNNqcCS--KDAEIKGFQKEn-QFSTSLTPWIDFTNIFGKI --DQSNFDLIENIIYDLTVFEDKKIMK | 637 |
| AIT42264 | 562 | KOLKEDYFKK--IECFDSVEISGVEDR---FNASLGTYHDLLKIIKDK DFLDNEENEDILEDIVLTLTLFEDREMIE | 633 |
| WP_034440723 | 568 | NOLVKYIENK---EQIIAPEIKGIEDS---FNSNYSTYIDLSKIPDMK --LLEKDEDEILEEIIKILTIFEDRKMRK | 637 |
| AKQ21048 | 562 | KQLKEDYFKK--IECFDSVEISGVEDR---FNASLGTYHDLLKIIKDK DELDNEENEDILEDIVLTLTLFEDREMIE | 633 |
| WP_004636532 | 563 | KDIANYLEQ---YGYVDGTDIKGVEDK---FNASLSTYNDLAKIDGAK AYLDDPEYADVWEDIIKILTIFEDKAMRK | 633 |
| WP_002364836 | 570 | KDIIQFYRNE--YN-TEIVTLSGLEED--QFNASFSTYQDLLKCGLTR AELDHPDNAEKLEDIIKILTIFEDRORIR | 641 |
| WP_016631044 | 521 | KDIIQFYRNE--YN-TEIVTLSGLEED--QFNASFSTYQDLLKCGLTR AELDHPDNAEKLEDIIKILTIFEDRORIR | 592 |
| EMS75795 | 306 | KKLQQFLSAN--YN-IEDAEILGVDKA---FNSSYATYHDELDLAKPN ELLEQPEMNAMFEDIVKILTIFEDREMIR | 381 |
| WP_002373311 | 570 | KDIIQFYRNE--YN-TEIVTLSGLEED--QFNASFSTYQDLLKCGLTR AELDHPDNAEKLEDIIKILTIFEDRORIR | 641 |
| WP_002378009 | 570 | KDIIQFYRNE--YN-TEIVTLSGLEED--QFNASFSTYQDLLKCGLTR AELDHPDNAEKLEDIIKILTIFEDRORIR | 641 |
| WP_002407324 | 570 | KDIIQFYRNE--YN-TEIVTLSGLEED--QFNASFSTYQDLLKCGLTR AELDHPDNAEKLEDIIKILTIFEDRORIR | 641 |
| WP_002413717 | 570 | KDIIQFYRNE--YN-TEIVTLSGLEED--QFNASFSTYQDLLKCGLTR AELDHPDNAEKLEDIIKILTIFEDRQRIR | 641 |
| WP_010775580 | 572 | KDIIQFYRNE--YN-TEIVTLSGLEED--QFNASFSTYQDLLKCGLTR AELDHPDNAEKLEDIIKILTIFEDRORIR | 643 |
| WP_010818269 | 570 | KDIIQFYRNE--YN-TEIVTLSGLEED--QFNASFSTYQDLLKCGLTR AELDHPDNAEKLEDIIKILTIFEDRQRIR | 641 |
| WP_010824395 | 570 | KDIIQFYRNE--YN-TEIVTLSGLEED--QFNASFSTYQDLLKCGLTR AELDHPDNAEKLEDIIKILTIFEDRORIR | 641 |
| WP_016622645 | 570 | KDIIQFYRNE--YN-TEIVTLSGLEED--QFNASFSTYQDLLKCGLTR AELDHPDNAEKLEDIIKILTIFEDRQRIR | 641 |
| WP_033624816 | 570 | KDIIQFYRNE--YN-TEIVTLSGLEED--QFNASFSTYQDLLKCGLTR AELDHPDNAEKLEDIIKILTIFEDRQRIR | 641 |
| WP_033625576 | 570 | KDIIQFYRNE--YN-TEIVTLSGLEED--QFNASFSTYQDLLKCGLTR AELDHPDNAEKLEDIIKILTIFEDRORIR | 641 |
| WP_033789179 | 570 | KDIIQFYRNE--YN-TEIVTLSGLEED--QFNASFSTYQDLLKCGLTR AELDHPDNAEKLEDIIKILTIFEDRORIR | 641 |
| WP_002310644 | 567 | KDLQEFLYLK--YD-IKHAELSGIEKA---FNASYTTYHDFLTMSENK QWLEDPELASMFEEIIKTLTVFEDREMIK | 641 |
| WP_002312694 | 568 | KDLQEFLYLK--YD-IKHAELSGIEKA---FNASYTTYHDFLTMSENK QWLEDPELASMFEEIIKTLTVFEDREMIK | 642 |
| WP_002314015 | 568 | KDLQEFLYLK--YD-IKHAELSGIEKA---FNASYTTYHDFLTMSENK QWLEDPELASMFEEIIKTLTVFEDREMIK | 642 |
| WP_002320716 | 568 | KDLQEFLYLK--YD-IKHAELSGIEKA---FNASYTTYHDFLTMSENK QWLEDPELASMFEEIIKTLTVFEDREMIK | 642 |
| WP_002330729 | 567 | KDLQEFLYLK--YD-IKHAELSGIEKA---FNASYTTYHDFLTMSENK QWLEDPELASMFEEIIKTLTVFEDREMIK | 641 |
| WP_002335161 | 568 | KDLQEFLYLK--YD-IKHAELSGIEKA---FNASYTTYHDFLTMSENK QWLEDPELASMFEEIIKTLTVFEDREMIK | 642 |
| WP_002345439 | 568 | KDLQEFLYLK--YD-IKHAELSGIEKA---FNASYTTYHDFLTMSENK QWLEDPELASMFEEIIKTLTVFEDREMIK | 642 |
| WP_034867970 | 562 | KKLONFLYTH--YH-IENAQIFGIEKA---FNASYSTYHDFMKLAKTN EWLEQPEMEPIFEDIVKILTIFEDRQMIK | 637 |
| WP_047937432 | 568 | KDLQEFLYLK--YD-IKHAELSGIEKA---FNASYTTYHDFLTMSENK QWLEDPELASMFEEIIKTLTVFEDREMIK | 642 |
| WP_010720994 | 562 | KKLONFLYTH--YH-IENAQIFGIEKA---FNASYSTYHDFMKLAKTN EWLEQPEMEPIFEDIVKILTIFEDRQMIK | 637 |
| WP_010737004 | 562 | KKLONFLYTH--YH-IENAQIFGIEKA---FNASYSTYHDFMKLAKTN EWLEQPEMEPIFEDIVKILTIFEDRQMIK | 637 |
| WP_034700478 | 562 | KKLONFLYTH--YH-IENAQIFGIEKA---FNASYSTYHDFMKLAKTN EWLEQPEMEPIFEDIVKILTIFEDROMIK | 637 |
| WP_007209003 | 564 | KKLENYLRIE1---SISSPSVKGIEEQ---FNANFGTYLDLKKEDELH PYLDDEKYQDTLEEVIKVLTVFEDRSMIQ | 634 |
| WP_023519017 | 560 | KOLRKFLELN--EQ-IDSTEIKGIETS---FNASYSTYHDLLKLS--- TLLDDPDMTTMFEEIIKILTIFEDREMIR | 631 |
| WP_010770040 | 564 | KLLEKFLSNE--FG-LVDVAIKGIE-T--SFNAGYGTYHDELKIGITR EQLDKEENSETLEEIVKILTVFEDRKMIR | 634 |
| WP_048604708 | 560 | KDLSNFLRNE--YN-LDDVIIDGIE-N--KFNASENTYHDFLKLKIDP KVLDDPANEPMFEEIVKILTIFEDRKMLR | 630 |
| WP_010750235 | 561 | KKLQHFLSAN--YN-IEDAEILGVDKV---FNSSYATYHDFLELAKPY ELLEQPEMEEMFEDIVKIITIFEDREMVR | 636 |
| AII16583 | 601 | KOLKEDYFKK--IECFDSVEISGVEDR---FNASLGTYHDLLKIIKDK DELDNEENEDILEDIVLTLTLFEDREMIE | 672 |
| WP_029073316 | 576 | NAMKKWLVKNqyFSNTDDIKIEGFQKEn-ACSTSLTPWIDFTKIFGEI ----NNSNYELIEKIIYDVTVFEDKKILR | 647 |
| WP_031589969 | 576 | NAMKKWLVKNqyFSNTDDIKIEGFQKEn-ACSTSLTPWIDFTKIFGKI ----NESNYDFIEKIIYDVTVFEDKKILR | 647 |
| KDA45870 | 558 | KMVIKHLKVV--MPAIRIQALKGLDNGk--FNASYGTYKDLVDMGVAP ELLNDEVNSEKWEDIIKTLTIFEGRKLIK | 630 |
| WP_039099354 | 579 | KNIQDYLVSEK--RYASRPAITGLSDEnk-FNSRLSTYHDLKTIVGDA --VDDVDKQADLEKCIEWSTIFEDGKIYS | 650 |
| AKP02966 | 561 | KKLTKWLIAQg---YYKNPILIGLSQKd-EFNSTLTTYLDMKKIFGSS -FMENNKNYNQIEELIEWLTIFEDKQILN | 632 |
| WP_010991369 | 567 | KDLELFLRNM--SH-VESPTIEGLE-D--SENSSYSTYHDLLKVGIKQ EILDNPVNTEMLENIVKILTVFEDKRMIK | 637 |
| WP_033838504 | 567 | KDLELFLRNM--SH-VESPTIEGLE-D--SENSSYSTYHDLLKVGIKQ EILDNPVNTEMLENIVKILTVFEDKRMIK | 637 |
| EHN60060 | 570 | KDLELFLRNM--SH-VESPTIEGLE-D--SENSSYSTYHDLLKVGIKQ EILDNPVNTEMLENIVKILTVFEDKRMIK | 640 |
| EFR89594 | 336 | KDLELFLRNM--SH-VESPTIEGLE-D--SFNSSYSTYHDLLKVGIKQ EILDNPVNTEMLENIVKILTVFEDKRMIK | 406 |
| WP_038409211 | 567 | KDLERFLYTI--NH-IESPTIEGVE-D--AFNSSFATYHDLQKGGVTQ EILDNPLNADMLEEIVKILTVFEDKRMIK | 637 |
| EFR95520 | 186 | KDLERFLYTI--NH-IESPTIEGVE-D--AFNSSFATYHDLQKGGVTQ EILDNPLNADMLEEIVKILTVFEDKRMIK | 256 |
| WP_003723650 | 567 | KDLELFLRNI--NH-IESPTIEGLE-D--SFNASYATYHDLLKVGMKQ EILDNPLNTEMLEDIVKILTVFEDKPMIK | 637 |
| WP_003727705 | 567 | KDLELFLRNI--NH-IESPTIEGLE-D--SFNASYATYHDLLKVGLKQ EILDNPLNTEILEDIVKILTVFEDKRMIK | 637 |
| WP_003730785 | 567 | KDLELFLRNI--NH-IESPTIEGLE-D--SFNASYATYHDLLKVGLKQ EILDNPLNTEILEDIVKILTVFEDKRMIK | 637 |
| WP_003733029 | 567 | KDLELFLRNI--NQ-IESPTIEGLE-D--SFNASYATYHDLLKVGMKQ EILDNPLNTEMLEDIVKILTVFEDKRMIK | 637 |
| WP_003739838 | 567 | KDLEQFLRNM--SH-IESPTIEGLE-D--SENSSYATYHDLLKVGIKQ EVLENPLNTEMLEDIVKILTVFEDKRMIK | 637 |
| WP_014601172 | 567 | KDLELFLRNI--NH-IESPTIEGLE-D--SFNASYATYHDLLKVGMKQ EILDNPLNTEMLEDIVKILTVFEDKPMIK | 637 |
| WP_023548323 | 567 | KDLELFLRNI--NH-VESPTIEGLE-D--SFNASYATYHDLMKVGIKQ EILDNPLNTEMLEDIVKILTVFEDKRMIK | 637 |
| WP_031665337 | 567 | KDLELFLRNI--NQ-IESPTIEGLE-D--SFNASYATYHDLLKVGMKQ EILDNPLNTEMLEDIVKILTVFEDKRMIK | 637 |
| WP_031669209 | 567 | KDLELFLRNI--NQ-IESPTIEGLE-D--SFNASYATYHDLLKVGMKQ EILDNPLNTEMLEDIVKILTVFEDKRMIK | 637 |
| WP_033920898 | 567 | KDLELFLRNI--NH-VESPTIEGLE-D--SFNASYATYHDLMKVGIKQ EILDNPLNTEMLEDIVKILTVFEDKRMIK | 637 |
| AKI42028 | 570 | KDLELFLRNI--NH-IESPTIEGLE-D--SFNASYATYHDLLKVGMKQ EILDNPLNTEMLEDIVKILTVFEDKPMIK | 640 |
| AKI50529 | 570 | KDLELFLRNI--NH-VESPTIEGLE-D--SFNASYATYHDLMKVGIKQ EILDNPLNTEMLEDIVKILTVFEDKRMIK | 640 |
| EFR83390 | 15 | KDLELFLRNI--NQ-IESPTIEGLE-D--SFNASYATYHDLLKVGMKQ EILDNPLNTEMLEDIVKILTVFEDKRMIK | 85 |
| WP_046323366 | 567 | KDLELFLYNM--NH-VESPTVEGVE-D--AFNSSFTTYHDLQKVGVPQ EILDDPLNTEMLEEIIKILTVFEDKRMIN | 637 |
| AKE81011 | 578 | KOLKEDYFKK--IECFDSVEISGVEDR---FNASLGTYHDLLKIIKDK DELDNEENEDILEDIVLTLTLFEDREMIE | 649 |
| CUO82355 | 572 | KKLKNWLVNNqcCR--KDAEIKGFQKEn-QFSTSLTPWIDFTNIFGKI ----DQSNEDLIEKIIYDLTVFEDKKIMK | 641 |
| WP_033162887 | 573 | KKLKDWLVTHqyYDINEELKIEGYQKD1-QFSTSLAPWIDFTKIFGEI ----NASNYQLIEKIIYDISIFEDKKILK | 644 |
| AGZ01981 | 595 | KOLKEDYFKK--IECFDSVEISGVEDR---FNASLGTYHDLLKIIKDK DELDNEENEDILEDIVLTLTLFEDREMIE | 666 |
| AKA60242 | 562 | KOLKEDYFKK--IECFDSVEISGVEDR---FNASLGTYHDLLKIIKDK DFLDNEENEDILEDIVLTLTLFEDREMIE | 633 |
| AKS40380 | 562 | KOLKEDYFKK--IECFDSVEISGVEDR---FNASLGTYHDLLKIIKDK DELDNEENEDILEDIVLTLTLFEDREMIE | 633 |
| 4UN5_B | 566 | KOLKEDYFKK--IECFDSVEISGVEDR---FNASLGTYHDLLKIIKDK DFLDNEENEDILEDIVLTLTLFEDREMIE | 637 |
| WP_010922251 | 634 | [chemical structure] | 702 |
| WP_039695303 | 638 | ERLOKYSDIFTANQLKKLER-RHYTGWGRLSYKLINGIRNK ENNKTILDYLI DDG---SANRNFMQLINDDTL | 706 |
| WP_045635197 | 633 | QRLAQYDSLFDEKVIKALTR-RHYTGWGKLSAKLINGICDK QTGNTILDYLI DDG---KINRNFMQLINDDGL | 701 |
| 5AXW_A | 369 | EELTNLNSELTQEEIEQISN1KGYTGTHNLSLKAINLILDE ---------LW -------TNDNQIAIFNRLKL | 426 |
| WP_009880683 | 318 | ERLKTYAHLEDDKVMKOLKR-RRYTGWGRLSRKLINGIRDK QSGKTILDFLK -DGf---ANRNFMQLIHDDSL | 386 |
| WP_010922251 | 634 | ERLKTYAHLFDDKVMKOLKR-RRYTGWGRLSRKLINGIRDK QSGKTILDFLK -DGf---ANRNFMQLIHDDSL | 702 |
| WP_011054416 | 634 | ERLKTYAHLFDDKVMKOLKR-RRYTGWGRLSRKLINGIRDK QSGKTILDFLK -DGf---ANRNFMQLIHDDSL | 702 |
| WP_011284745 | 634 | ERLKTYAHLFDDKVMKOLKR-RRYTGWGRLSRKLINGIRDK QSGKTILDFLK -DGf---ANRNFMQLIHDDSL | 702 |
| WP_011285506 | 634 | ERLKTYAHLFDDKVMKOLKR-RRYTGWGRLSRKLINGIRDK QSGKTILDFLK -DGf---ANRNFMQLIHDDSL | 702 |
| WP_011527619 | 634 | ERLKTYAHLFDDKVMKOLKR-RRYTVWGRLSRKLINGIRDK QSGKTILDFLK -DGf---ANRNFMQLIHDDSL | 702 |
| WP_012560673 | 634 | ERLKTYAHLFDDKVMKOLKR-RRYTGWGRLSRKLINGIRDK QSGKTILDELK -DGf---ANRNFMQLIHDDSL | 702 |
| WP_014407541 | 634 | ERLKTYAHLFDDKVMKOLKR-RRYTGWGRLSRKLINGIRDK QSGKTILDFLK -DGf---ANRNFMQLIHDDSL | 702 |
| WP_020905136 | 634 | ERLKTYAHLFDDKVMKOLKR-RRYTGWGRLSRKLINGIRDK QSGKTILDFLK -DGf---ANRNFMQLIHDDSL | 702 |
| WP_023080005 | 634 | ERLKKYANLFDDKVMKOLKR-RHYTGWGRLSRKLINGIRDK QSGKTILDFLK -DGf---ANRNFMQLINDDSL | 702 |
| WP_023610282 | 634 | ERLKKYANLFDDKVMKOLKR-RHYTGWGRLSRKLINGIRDK QSGKTILDFLK -DGf---ANRNFMQLINDDSL | 702 |
| WP_030125963 | 634 | ERLKTYAHLFDDKVMKOLKR-RRYTGWGRLSRKLINGIRDK QSGKTILDFLK -DGf---ANRNFMQLIHDDSL | 702 |
| WP_030126706 | 634 | ERLKTYAHLFDDKVMKOLKR-RRYTGWGRLSRKLINGIRDK QSGKTILDFLK -DGf---ANRNFMQLIHDDSL | 702 |
| WP_031488318 | 634 | ERLKTYAHLFDDKVMKOLKR-RRYTGWGRLSRKLINGIRDK QSGKTILDFLK -DGf---ANRNFMQLIHDDSL | 702 |
| WP_032460140 | 634 | ERLKTYAHLFDDKVMKOLKR-RRYTGWGRLSRKLINGIRDK QSGKTILDFLK -DGf---ANRNFMQLIHDDSL | 702 |
| WP_032461047 | 634 | ERLKTYAHLEDDKVMKOLKR-RRYTGWGRLSRKLINGIRDK QSGKTILDFLK -DGf---ANRNFMQLIHDDSL | 702 |
| WP_032462016 | 634 | ERLKTYAHLFDDKVMKOLKR-RRYTGWGRLSRKLINGIRDK QSGKTILDFLK -DGf---ANRNFMQLIHDDSL | 702 |
| WP_032462936 | 634 | ERLKKYAHLFDDKVMKOLKR-RRYTGWGRLSRKLINGIRDK QSGKTILDFLK -DGf---ANRNFMQLIHDDSL | 702 |
| WP_032464890 | 634 | ERLKTYAHLEDDKVMKOLKR-RRYTGWGRLSRKLINGIRDK QSGKTILDFLK -DGf---ANRNFMQLIHDDSL | 702 |
| WP_033888930 | 459 | ERLKTYAHLEDDKVMKOLKR-RRYTGWGRLSRKLINGIRDK QSGKTILDFLK -DGf---ANRNFMQLIHDDSL | 527 |
| WP_038431314 | 634 | ERLKTYAHLEDDKVMKQLKR-RRYTGWGRLSRKLINGIRDK QSGKTILDFLK -DGf---ANRNFMQLIHDDSL | 702 |
| WP_038432938 | 634 | ERLKKYANLFDDKVMKQLKR-RHYTGWGRLSRKLINGIRDK QSGKTILDFLK -DGf---ANRNFMQLINDDSL | 702 |
| WP_038434062 | 634 | ERLKTYAHLEDDKVMKOLKR-RRYTGWGRLSRKLINGIRDK QSGKTILDFLK -DGf---ANRNFMQLIHDDSL | 702 |
| BAQ51233 | 545 | ERLKTYAHLFDDKVMKOLKR-RRYTGWGRLSRKLINGIRDK QSGKTILDFLK -DGf---ANRNFMQLIHDDSL | 613 |
| KGE60162 | | ----------------------------------------- ----------- --------------------- | |
| KGE60856 | | ----------------------------------------- ----------- --------------------- | |
| WP_002989955 | 634 | ERLKTYAHLFDDKVMKQLKR-RRYTGWGRLSRKLINGIRDK QSGKTILDFLK -DGf---ANRNFMQLIHDDSL | 702 |
| WP_003030002 | 635 | QRLOKYSDIFTKAQLKKLER-RHYTGWGRLSYKLINGIRNK ENKKTILDYLI DDG---YANRNFMQLINDDAL | 703 |
| WP_003065552 | 638 | ERLOKYSDIFTADQLKKLER-RHYTGWGRLSYKLINGIRNK ENNKTILDYLI DDG---SANRNFMQLINDDTL | 706 |
| WP_001040076 | 633 | KRLDIYKDFFTESQLKKLYR-RHYTGWGRLSAKLINGIRNK ENQKTILDYLI DDG---SANRNFMQLIKDAGL | 701 |
| WP_001040078 | 636 | KRLENYKDLFTESQLKKLYR-RHYTGWGRLSAKLINGIRDK ESQKTILDYLI DDG---RSNRNFMQLINDDGL | 704 |
| WP_001040080 | 636 | KRLENYKDLFTESQLKKLYR-RHYTGWGRLSAKLINGIRDK ESQKTILDYLI DDG---RSNRNFMQLINDDGL | 704 |
| WP_001040081 | 636 | KRLENYKDLFTESQLKKLYR-RHYTGWGRLSAKLINGIRDK ESQKTILDYLI DDG---RSNRNFMQLINDDGL | 704 |
| WP_001040083 | 636 | KRLENYKDLFTESQLKKLYR-RHYTGWGRLSAKLINGIRDK ESQKTILDYLI DDG---RSNRNFMQLINDDGL | 704 |
| WP_001040085 | 636 | KRLENYKDLFTESQLKKLYR-RHYTGWGRLSAKLINGIRDK ESQKTILDYLI DDG---RSNRNFMQLINDDGL | 704 |
| WP_001040087 | 636 | KRLENYKDLFTESQLKKLYR-RHYTGWGRLSAKLINGIRDK ESQKTILDYLI DDG---RSNRNFMQLINDDGL | 704 |
| WP_001040088 | 636 | KRLENYKDLFTESQLKKLYR-RHYTGWGRLSAKLINGIRDK ESQKTILDYLI DDG---RSNRNFMQLINDDGL | 704 |
| WP_001040089 | 636 | KRLENYKDLFTESQLKKLYR-RHYTGWGRLSAKLINGIRDK ESQKTILDYLI DDG---RSNRNFMQLINDDGL | 704 |
| WP_001040090 | 636 | KRLENYKDLFTESQLKKLYR-RHYTGWGRLSAKLINGIRDK ESQKTILDYLI DDG---RSNRNFMQLINDDGL | 704 |
| WP_001040091 | 636 | KRLENYKDLFTESQLKKLYR-RHYTGWGRLSAKLINGIRDK ESQKTILDYLI DDG---RSNRNFMQLINDDGL | 704 |
| WP_001040092 | 636 | KRLENYKDLFTESQLKKLYR-RHYTGWGRLSAKLINGIRDR ESQKTILDYLI SDG---RANRNFMQLINDDGL | 704 |
| WP_001040094 | 633 | KRLDIYKDFFTESQLKKLYR-RHYTGWGRLSAKLINGIRNK ENQKTILDYLI DDG---SANRNFMQLIKDAGL | 701 |
| WP_001040095 | 633 | KRLDIYKDFFTESQLKKLYR-RHYTGWERLSAKLINGIRNK ENQKTILDYLI DDG---SANRNFMQLIKDAGL | 701 |
| WP_001040096 | 633 | KRLDIYKDFFTESQLKKLYR-RHYTGWGRLSAKLINGIRNK ENQKTILDYLI DDG---SANRNFMQLIKDAGL | 701 |
| WP_001040097 | 633 | KRLDIYKDFFTESQLKKLYR-RHYTGWGRLSAKLINGIRNK ENQKTILDYLI DDG---SANRNFMQLIKDAGL | 701 |
| WP_001040098 | 633 | KRLDIYKDFFTESQLKKLYR-RHYTGWGRLSAKLINGIRNK ENQKTILDYLI DDG---SANRNFMQLIKDAGL | 701 |
| WP_001040099 | 633 | KRLDIYKDFFTESQLKKLYR-RHYTGWGRLSAKLINGIRNK ENQKTILDYLI DDG---SANRNFMQLIKDAGL | 701 |
| WP_001040100 | 633 | KRLDIYKDFFTESQLKKLYR-RHYTGWGRLSAKLINGIRNK ENQKTILDYLI DDG---SANRNFMQLIKDAGL | 701 |
| WP_001040104 | 636 | KRLENYKDLFTESQLKKLYR-RHYTGWGRLSAKLINGIRDK ESQKTILDYLI DDG---RSNRNFMQLINDDGL | 704 |
| WP_001040105 | 636 | KRLENYKDLFTESQLKKLYR-RHYTGWGRLSAKLINGIRDK ESQKTILDYLI DDG---RSNRNFMQLINDDGL | 704 |
| WP_001040106 | 636 | KRLENYKDLFTESQLKKLYR-RHYTGWGRLSAKLINGIRDK ESQKTILDYLI SDG---RANRNFMQLIHDDGL | 704 |
| WP_001040107 | 636 | KRLENYKDLFTESQLKKLYR-RHYTGWGRLSAKLINGIRDK ESQKTILDYLI SDG---RANRNFMQLIHDDGL | 704 |
| WP_001040108 | 636 | KRLENYKDLFTESQLKKLYR-RHYTGWGRLSAKLINGIRDK ESQKTILDYLI SDG---RANRNFMQLIHDDGL | 704 |
| WP_001040109 | 636 | KRLENYKDLFTESQLKKLYR-RHYTGWGRLSAKLINGIRDK ESQKTILDYLI SDG---RANRNFMQLIHDDGL | 704 |
| WP_001040110 | 636 | KRLENYKDLFTESQLKKLYR-RHYTGWGRLSAKLINGIRDK ESQKTILDYLI SDG---RANRNFMQLIHDDGL | 704 |
| WP_015058523 | 636 | KRLENYKDLFTESQLKKLYR-RHYTGWGRLSAKLINGIRDR ESQKTILDYLI SDG---RANRNFMQLINDDGL | 704 |
| WP_017643650 | 633 | KRLDIYKDFFTESQLKKLYR-RHYTGWGRLSAKLINGIRNK ENQKTILDYLI DDG---SANRNFMQLIKDAGL | 701 |
| WP_017647151 | 636 | KRLENYKDLFTESQLKKLYR-RHYTGWGRLSAKLINGIRDK ESQKTILDYLI DDG---KSNRNFMQLIHDDGL | 704 |
| WP_017648376 | 636 | KRLENYKDLFTESQLKKLYR-RHYTGWGRLSAKLINGIRDK ESQKTILDYLI DDG---KSNRNFMQLIHDDGL | 704 |
| WP_017649527 | 636 | KRLENYKDLFTESQLKKLYR-RHYTGWGRLSAKLINGIRDK ESQKTILDYLI DDG---RSNRNEMQLINDDGL | 704 |
| WP_017771611 | 636 | KRLENYKDLFTESQLKKLYR-RHYTGWGRLSAKLINGIRDK ESQKTILDYLI SDG---RANRNFMOLIHDDGL | 704 |
| WP_017771984 | 636 | KRLENYKDLFTESQLKKLYR-RHYTGWGRLSAKLINGIRDK ESQKTILDYLI DDG---RSNRNFMQLINDDGL | 704 |
| CFQ25032 | 636 | KRLENYKDLFTESQLKKLYR-RHYTGWGRLSAKLINGIRDK ESQKTILDYLI DDG---RSNRNFMQLINDDGL | 704 |
| CFV16040 | 636 | KRLENYKDLFTESQLKKLYR-RHYTGWGRLSAKLINGIRDK ESQKTILDYLI DDG---RSNRNFMQLINDDGL | 704 |
| KLJ37842 | 636 | KRLENYKDLFTESQLKKLYR-RHYTGWGRLSAKLINGIRDK ESQKTILDYLI DDG---RSNRNFMQLINDDGL | 704 |
| KLJ72361 | 636 | KRLENYKDLFTESQLKKLYR-RHYTGWGRLSAKLINGIRDK ESQKTILDYLI DDG---RSNRNFMQLINDDGL | 704 |
| KLL20707 | 636 | KRLENYKDLFTESQLKKLYR-RHYTGWGRLSAKLINGIRDK ESQKTILDYLI DDG---RSNRNFMQLINDDGL | 718 |
| KLL42645 | 636 | KRLENYKDLFTESQLKKLYR-RHYTGWGRLSAKLINGIRDK ESQKTILDYLI SDG---RANRNFMQLIHDDGL | 704 |
| WP_047207273 | 636 | KRLENYKDLFTESQLKKLYR-RHYTGWGRLSAKLINGIRDK ESQKTILDYLI DDG---RSNRNFMQLINDDGL | 704 |
| WP_047209694 | 633 | KRLDIYKDFFTESQLKKLYR-RHYTGWGRLSAKLINGIRNK ENQKTILDYLI DDG---SANRNFMQLIKDAGL | 701 |
| WP_050198062 | 636 | KRLENYKDLFTESQLKKLYR-RHYTGWGRLSAKLINGIRDK ESQKTILDYLI DDG---RSNRNFMQLINDDGL | 704 |
| WP_050201642 | 636 | KRLENYKDLFTESQLKKLYR-RHYTGWGRLSAKLINGIRDK ESQKTILDYLI DDG---RSNRNFMQLINDDGL | 704 |
| WP_050204027 | 636 | KRLENYKDLFTESQLKKLYR-RHYTGWGRLSAKLINGIRDK ESQKTILDYLI SDG---RANRNFMQLIHDDGL | 704 |
| WP_050881965 | 636 | KRLENYKDLFTESQLKKLYR-RHYTGWGRLSAKLINGIRDK ESQKTILDYLI DDG---RSNRNFMQLINDDGL | 704 |
| WP_050886065 | 636 | KRLENYKDLFTESQLKKLYR-RHYTGWGRLSAKLINGIRDK ESQKTILDYLI DDG---RSNRNFMQLINDDGL | 704 |
| AHN30376 | 636 | KRLENYKDLFTESQLKKLYR-RHYTGWGRLSAKLINGIRDR ESQKIILDYLI SDG---RANRNFMQLINDDGL | 704 |
| EAO78426 | 636 | KRLENYKDLFTESQLKKLYR-RHYTGWGRLSAKLINGIRDK ESQKTILDYLI DDG---RSNRNFMQLINDDGL | 704 |
| CCW42055 | 636 | KRLDIYKDFFTESQLKKLYR-RHYTGWGRLSAKLINGIRNK ENQKTILDYLI DDG---SANRNFMQLIKDAGL | 704 |
| WP_003041502 | 635 | QRLQKYSDIFTKAQLKKLER-RHYTGWGRLSYKLINGIRNK ENKKTILDYLI DDG---YANRNFMQLINDDAL | 703 |
| WP_037593752 | 636 | QRLQKYSDIFTKAQLKKLER-RHYTGWGRLSYKLINGIRNK ENKKTILDYLI DDG---YANRNFMQLINDDAL | 704 |
| WP_049516684 | 636 | QRLOKYSDIFTTQQLKKLER-RHYTGWGRLSYKLINGIRNK ENKKTILDYLI DDG---YANRNFMQLINDDAL | 704 |
| GAD46167 | 635 | QRLOKYSDIFTKAQLKKLER-RHYTGWGRLSYKLINGIRNK ENKKTILDYLI DDG---YANRNFMQLINDDAL | 703 |
| WP_018363470 | 636 | QRLOKYSDIFTKQQLKKLER-RHYTGWGRLSYKLINGIRNK ENNKTILDYLI DDG---SANRNFMQLINDDAL | 704 |
| WP_003043819 | 644 | ERLKTYAHLFDDKVMKOLKR-RHYTGWGRLSRKMINGIRDK QSGKTILDELK -DGf---SNRNFMQLIHDDSL | 712 |
| WP_006269658 | 635 | QRLOKYSDIFTKAQLKKLER-RHYTGWGRLSYKLINGIRNK ENKKTILDYLI DDG---YANRNFMQLINDDAL | 703 |
| WP_048800889 | 635 | QRLQKYSDIFTKAQLKKLER-RHYTGWGRLSYKLINGIRNK ENNKTILEYLV DDG---YANRNFMQLINDDTL | 703 |
| WP_012767106 | 634 | ERLKKYANLFDDKVMKOLKR-RHYTGWGRLSRKLINGIRDK QSGKTILDFLK -DGf---ANRNFMQLINDDSL | 702 |
| WP_014612333 | 634 | ERLKKYANLEDDKVMKOLKR-RHYTGWGRLSRKLINGIRDK QSGKTILDFLK -DGf---ANRNFMQLINDDSL | 702 |
| WP_015017095 | 634 | ERLKTYAHLEDDKVMKOLKR-RHYTGWGRLSRKLINGIRDK QSGKTILDFLK -DGf---ANRNFIQLIHDDSL | 702 |
| WP_015057649 | 634 | ERLKKYANLFDDKVMKQLKR-RHYTGWGRLSRKLINGIRDK QSGKTILDFLK -DGf---ANRNFMQLINDDSL | 702 |
| WP_048327215 | 634 | ERLKTYAHLFDDKVMKOLKR-RHYTGWGRLSRKLINGIRDK QSGKTILDFLK -DGf---ANRNFIQLIHDDSL | 702 |
| WP_049519324 | 634 | ERLKTYAHLEDDKVMKOLKR-RHYTGWGRLSRKLINGIRDK QSGKTILDFLK -DGf---ANRNFIQLIHDDSL | 702 |
| WP_012515931 | 634 | KRLDQYAHLFDKVVINKLER-HHYTGWGRLSGKLINGIRDK QSGKTILDFLK -DGf---ANRNFMQLIHDSEL | 702 |
| WP_021320964 | 634 | KRLDQYAHLFDKVVINKLER-HHYTGWGRLSGKLINGIRDK QSGKTILDFLK -DGf---ANRNFMQLIHDSEL | 702 |
| WP_037581760 | 634 | KRLDQYAHLFDKVVLNKLER-HHYTGWGRLSGKLINGIRDK QSGKTILDFLK -DGf---ANRNFMQLIHDSEL | 702 |
| WP_004232481 | 635 | ERLOKYSDIFTSQQLKKLER-RHYTGWGRLSYKLINGIRNK ENNKTILDFLI DDG---DANRNFMQLINDDSL | 703 |
| WP_009854540 | 636 | ERLOKYSDIFTANQLKKLER-RHYTGWGRLSYKLINGIRNK ENNKTILDYLI DDG---SANRNFMQLINDDTL | 704 |
| WP_012962174 | 636 | QRLQKYSDIFTPQQLKKLER-RHYTGWGRLSYKLINGIRNK ENGKSILDYLI DDG---YANRNFMQLISDDTL | 704 |
| WP_039695303 | 638 | ERLOKYSDIFTANQLKKLER-RHYTGWGRLSYKLINGIRNK ENNKTILDYLI DDG---SANRNFMQLINDDTL | 706 |
| WP_014334983 | 635 | ERLQKYSDFFTSQQLKKLER-RHYTGWGRLSYKLINGIRNK ENNKTILDFLI DDG---HANRNEMQLINDESL | 703 |
| WP_003099269 | 634 | RRLVKYADVFEKSVLKKLKK-RHYTGWGRLSQKLINGIKDK QTGKTILGFLK -DGv---ANRNFMQLINDSSL | 702 |
| AHY15608 | 634 | RRLVKYADVFEKSVLKKLKK-RHYTGWGRLSQKLINGIKDK QTGKTILGFLK -DGv---ANRNFMQLINDSSL | 702 |
| AHY17476 | 634 | RRLVKYADVFEKSVLKKLKK-RHYTGWGRLSQKLINGIKDK QTGKTILGFLK -DGv---ANRNFMQLINDSSL | 702 |
| ESR09100 | | ----------------------------------------- ----------- --------------------- | |
| AGM98575 | 634 | RRLVKYADVFEKSVLKKLKK-RHYTGWGRLSQKLINGIKDK QTGKTILGFLK -DGv---ANRNFMQLINDSSL | 702 |
| ALF27331 | 635 | KRLENYSDLLTKEQVKNLER-RHYTGWGRLSAELIHGIRNK ESRKTILDYLI DDG---NSNRNFMQLINDDAL | 703 |
| WP_018372492 | 648 | KRLSELNIPFENKIIKKLAR-KKYTGWGNLSRKLIDGIRNR ETNRTILGHLI DDGf---SNRNLMQLINDDGL | 716 |
| WP_045618028 | 634 | QRLAHYASIFDEKVIKALTR-RHYTGWGKLSAKLINGIYDK QSKKTILDYLI DDG---EINRNFMQLINDDGL | 702 |
| WP_045635197 | 633 | QRLAQYDSLFDEKVIKALTR-RHYTGWGKLSAKLINGICDK QTGNTILDYLI DDG---KINRNFMQLINDDGL | 701 |
| WP_002263549 | 635 | KRLENYSDLLTKEQVKKLER-RHYTGWGRLSAELIHGIRNK ESRKTILDYLI DDG---NSNRNFMQLINDDAL | 703 |
| WP_002263887 | 635 | KRLENYSDLLTKEQVKKLER-RHYTGWGRLSAELIHGIRNK ESRKTILDYLI DDG---NSNRNFMQLINDDAL | 703 |
| WP_002264920 | 635 | KRLKNYSDLLTKEQLKKLER-RHYTGWGRLSAELIHGIRNK ESRKTILDYLI DDG---NSNRNFMQLINDDAL | 703 |
| WP_002269043 | 635 | KRLKNYSDLLTKEQLKKLER-RHYTGWGRLSAELIHGIRNK ESRKTILDYLI DDG---NSNRNFMQLINDDAL | 703 |
| WP_002269448 | 635 | KRLENYSDLLTKEQVKKLER-RHYTGWGRLSAELIHGIRNK ESRKTILDYLI DDG---NSNRNFMQLINDDAL | 703 |
| WP_002271977 | 635 | KRLENYSDLLTKEQVKKLER-RHYTGWGRLSAELIHGIRNK ESRKTILDYLI DDG---NSNRNFMQLINDDAL | 703 |
| WP_002272766 | 635 | KRLENYSDLLTKEQVKKLER-RHYTGWGRLSAELIHGIRNK ESRKTILDYLI DDG---NSNRNFMQLINDDAL | 703 |
| WP_002273241 | 635 | KRLENYSDLLTKEQVKKLER-RHYTGWGRLSAELIHGIRNK ESRKTILDYLI DDG---NSNRNFMQLINDDAL | 703 |
| WP_002275430 | 635 | KRLENYSDLLTKEQVKKLER-RHYTGWGRLSAELIHGIRNK ESRKTLLDYLI DDG---NSNRNFMQLINDDAL | 703 |
| WP_002276448 | 635 | KRLENYSDLLTKEQVKKLER-RHYTGWGRLSAELIHGIRNK ESRKTILDYLI DDG---NSNRNFMQLINDDAL | 703 |
| WP_002277050 | 636 | QRLAKYADVEDKKVIDQLAR-RHYTGWGRLSAKLLNGIRDK QSCKTIMDYLI DDA---QSNRNLMQLITDDNL | 704 |
| WP_002277364 | 635 | KRLENYSDLLTKEQVKKLER-RHYTGWGRLSAELIHGIRNK ESRKTILDYLI DDG---NSNRNFMQLINDDAL | 703 |
| WP_002279025 | 635 | KRLKNYSDLLTKEQLKKLER-RHYTGWGRLSAELIHGIRNK ESRKTILDYLI DDG---NSNRNFMQLINDDAL | 703 |
| WP_002279859 | 635 | KRLKNYSDLLTKEQLKKLER-RHYTGWGRLSAELIHGIRNK ESRKTILDYLI DDG---NSNRNFMQLINDDAL | 703 |
| WP_002280230 | 635 | KRLENYSDLLTKEQVKKLER-RHYTGWGRLSAELIHGIRNK ESRKTILDYLI DDG---NSNRNFMQLINDDAL | 703 |
| WP_002281696 | 635 | KRLENYSDLLTKEQVKKLER-RHYTGWGRLSAELIHGIRNK ESRKTILDYLI DDG---NSNRNFMQLINDDAL | 703 |
| WP_002282247 | 636 | QRLAKYADVEDKKVIDQLAR-RHYTGWGRLSAKLLNGIRDK QSCKTIMDYLI DDA---QSNRNLMQLITDDNL | 704 |
| WP_002282906 | 635 | KRLENYSDLLTKEQVKKLER-RHYTGWGRLSAELIHGIRNK ESRKTILDYLI DDG---NSNRNFMQLINDDAL | 703 |
| WP_002283846 | 635 | KRLKNYSDLLTKEQLKKLER-RHYTGWGRLSAELIHGIRNK ESRKTILDYLI DDG---NSNRNFMQLINDDAL | 703 |
| WP_002287255 | 635 | KRLENYSDLLIKEQVKKLER-RHYTGWGRLSAELIHGIRNK ESRKTILDYLI DDG---NSNRNFMQLINDDAL | 703 |
| WP_002288990 | 635 | KRLKNYSDLLTKEQLKKLER-RHYTGWGRLSAELIHGIRNK ESRKTILDYLI DDG---NSNRNFMQLINDDAL | 703 |
| WP_002289641 | 635 | KRLENYSDLLTKEQVKKLER-RHYTGWGRLSAELIHGIRNK ESRKTILDYLI DDG---NSNRNFMQLINDDAL | 703 |
| WP_002290427 | 635 | KRLKNYSDLLTKEQLKKLER-RHYTGWGRLSAELIHGIRNK ESRKTILDYLI DDG---NSNRNFMQLINDDAL | 703 |
| WP_002295753 | 635 | KRLENYSDLLTKEQVKKLER-RHYTGWGRLSAELIHGIRNK ESRKTILDYLI DDG---NSNRNFMQLINDDAL | 703 |
| WP_002296423 | 635 | KRLKNYSDLLTKEQLKKLER-RHYTGWGRLSAELIHGIRNK ESRKTILDYLI DDG---NSNRNFMQLINDDAL | 703 |
| WP_002304487 | 645 | QRLQKYSDIFTKAQLKKLER-RHYTGWGRLSYKLINGIRDK QSNKTILGYLI DDG---YSNRNFMQLINDDAL | 713 |
| WP_002305844 | 635 | KRLENYSDLLIKEQVKKLER-RHYTGWGRLSAELIHGIRNK ESRKTILDYLI DDG---NSNRNFMQLINDDAL | 703 |
| WP_002307203 | 635 | KRLENYSDLLTKEQVKKLER-RHYTGWGRLSAELIHGIRNK ESRKTLLDYLI DDG---NSNRNFMQLINDDAL | 703 |
| WP_002310390 | 635 | KRLKNYSDLLTKEQLKKLER-RHYTGWGRLSAELIHGIRNK ESRKTILDYLI DDG---NSNRNFMQLINDDAL | 703 |
| WP_002352408 | 635 | KRLENYSDLLTKEQVKKLER-RHYTGWGRLSAELIHGIRNK ESRKTLLDYLI DDG---NSNRNFMQLINDDAL | 703 |
| WP_012997688 | 635 | KRLENYSDLLTKEQVKKLER-RHYTGWGRLSAELIHGIRNK ESRKTILDYLI DDG---NSNRNFMQLINDDAL | 703 |
| WP_014677909 | 635 | KRLKNYSDLLTKEQLKKLER-RHYTGWGRLSAELIHGIRNK ESRKTILDYLI DDG---NSNRNFMQLINDDAL | 703 |
| WP_019312892 | 635 | KRLENYSDLLTKEQVKKLER-RHYTGWGRLSAELIHGIRNK ESRKTILDYLI DDG---NSNRNFMQLINDDAL | 703 |
| WP_019313659 | 635 | KRLENYSDLLTKEQVKKLER-RHYTGWGRLSAELIHGIRNK ESRKTILDYLI DDG---NSNRNFMQLINDDAL | 703 |
| WP_019314093 | 635 | KRLENYSDLLTKEQVKKLER-RHYTGWGRLSAELIHGIRNK ESRKTLLDYLI DDG---NSNRNFMQLINDDAL | 703 |
| WP_019315370 | 635 | KRLENYSDLLTKEQVKKLER-RHYTGWGRLSAELIHGIRNK ESRKTLLDYLI DDG---NSNRNFMQLINDDAL | 703 |
| WP_019803776 | 635 | KRLENYSDLLTKEQVKKLER-RHYTGWGRLSAELIHGIRNK ESRKTILDYLI DDG---NSNRNFMQLINDDAL | 703 |
| WP_019805234 | 635 | KRLKNYSDLLTKEQLKKLER-RHYTGWGRLSAELIHGIRNK ESRKTILDYLI DDG---NSNRNFMQLINDDAL | 703 |
| WP_024783594 | 635 | KRLENYSDLLTKEQVKKLER-RHYTGWGRLSAELIHGIRNK ESRKTILDYLI DDG---NSNRNFMQLINDDAL | 703 |
| WP_024784288 | 636 | QRLAKYADVEDKKVIDQLAR-RHYTGWGRLSAKLLNGIRDK QSCKTIMDYLI DDA---QSNRNLMQLITDDNL | 704 |
| WP_024784666 | 635 | KRLENYSDLLTKEQVKKLER-RHYTGWGRLSAELIHGIRNK ESRKTILDYLI DDG---NSNRNFMQLINDDAL | 703 |
| WP_024784894 | 635 | KRLENYSDLLTKEQVKKLER-RHYTGWGRLSAELIHGIRNK ESRKTILDYLI DDG---NSNRNFMQLINDDAL | 703 |
| WP_024786433 | 636 | QRLAKYADVFDKKVIDQLAR-RHYTGWGRLSAKLLNGIRDK QSCKTIMDYLI DDA---QSNRNLMQLITDDNL | 704 |
| WP_049473442 | 635 | KRLENYSDLLTKEQVKKLER-RHYTGWGRLSAELIHGIRNK ESRKTILDYLI DDG---NSNRNFMQLINDDAL | 703 |
| WP_049474547 | 635 | KRLENYSDLLTKEQVKKLER-RHYTGWGRLSAELIHGIRNK ESRKTILDYLI DDG---NSNRNFMQLINDDAL | 703 |
| EMC03581 | 628 | KRLENYSDLLTKEQVKKLER-RHYTGWGRLSAELIHGIRNK ESRKTILDYLI DDG---NSNRNFMQLINDDAL | 696 |
| WP_000428612 | 636 | QRLAQYDSLFDEKVIKALTR-RHYTGWGKLSSKLINGIRDK QTGKTILDYLM DDG---YNNRNFMQLINDDEL | 704 |
| WP_000428613 | 634 | QRLAQYDSLFDEKVIKALIR-RHYTGWGKLSAKLIDGICDK QTGNTILDYLI DDG---KNNRNFMQLINDDGL | 702 |
| WP_049523028 | 633 | QRLNQYDSIFDEKVIKALTR-RHYTGWGKLSAKLINGIRDK KTSKTILDYLI DDG---YSNRNFMQLINDDGL | 701 |
| WP_003107102 | 603 | KRLSKYESIFDPSILKKLKK-RHYTGWGRLSQKLINGIRDK QTGKTILDFLI -DGq---ANRNFMQLINDPSL | 671 |
| WP_054279288 | 636 | NRLAVYEDLFDQNVLKOLKR-RHYTGWGRLSKOLINGMRDK HTGKTILDFLK -DGf---INRNFMQLINDDNL | 704 |
| WP_049531101 | 634 | QRLAQYASIFDEKVIKTLTR-RHYTGWGKLSAKLINCIRDR KTGKTILDYLI DDG---YNNRNFMQLINDDGL | 702 |
| WP_049538452 | 634 | QRLAQYDSIFDEKVIKALTR-RHYTGWGKLSAKLINGIRDK QTGKTILDYLI DDG---YSNRNEMQLINDDGL | 702 |
| WP_049549711 | 634 | QRLAQYDSLFDKKVIKALTR-RHYTGWGKLSAKLINGICDK QTGNTILDYLI DDG---EINRNFMQLINDDGL | 702 |
| WP_007896501 | 637 | KRLAKYANLFEKSVLKKLRK-RHYRGWGRLSRQLIDGMKDK ASGKTILDFLK -DDf---ANRNFIQLINDSSL | 705 |
| EFR44625 | 589 | KRLAKYANLFEKSVLKKLRK-RHYRGWGRLSRQLIDGMKDK ASGKTILDFLK -DDf---ANRNFIQLINDSSL | 657 |
| WP_002897477 | 633 | QRLAQYDTLFDEKVIKALTR-RHYTGWGKLSAKLINGIRDK QSGKTILDYLI DDD---KINRNFMQLINDDGL | 701 |
| WP_002906454 | 633 | QRLAQYDTLFDEKVIKALTR-RHYTGWGKLSAKLINGIRDK QTGKTILEYLI DDG---DCNRNFMQLINDDGL | 701 |
| WP_009729476 | 634 | QRLAQYDSLFDEKVIKALTR-RHYTGWGKLSAKLINGISDK QTGNTILDYLI DDG---EINRNFMQLINDDGL | 702 |
| COR24647 | 637 | QRLLKYEDIFSKKVIANLTR-RHYTGWGRLSAKLINGIKDK HSRKTILDYLI DDG---HSNRNFMQLINDDNL | 705 |
| WP_000066813 | 636 | QRLAQYDSLFDEKVIKALTR-RHYTGWGKLSAKLINGIRDK KSGKTILDYLI DDG---EINRNFMQLIHDDGL | 704 |
| WP_009754323 | 634 | QRLAQYDSIFDEKVIKALTR-RHYTGWGKLSAKLINGICDK KTGKTILDYLI DDG---YNNRNFMQLINDDGL | 702 |
| WP_044674937 | 633 | KRLEKYKDILTEEQRKKLER-RHYTGWGRLSAKLINGILDK VTRKTILGYLI DDG---TSNRNFMQLINDDTL | 701 |
| WP_044676715 | 635 | KRLEKYKDVLTEEQRKKLER-RHYTGWGRLSAKLINGIRDK VTRKTILDYLI DDG---TSNRNFMQLINDDTL | 703 |
| WP_044680361 | 635 | KRLEKYKDVLTEEQRKKLER-RHYTGWGRLSAKLINGIRDK VTRKTILDYLI DDG---TSNRNFMQLINDDTL | 703 |
| WP_044681799 | 633 | KRLEKYKDILTEEQRKKLER-RHYTGWGRLSAKLINGILDK VTRKTILGYLI DDG---TSNRNFMQLINDDTL | 701 |
| WP_049533112 | 635 | QRLOKYSDIFTKAQLKKLER-CHYTGWGRLSYKLINGIRNK ENKKTILDYLI DDG---YANRNFMQLINDDAL | 703 |
| WP_029090905 | 613 | RKLSEYPQLTEQQQVOLAQV--RFRGWGRLSQRLINRIKTP EDHKLSINEIL ------QTNENFMQIIRNKDY | 682 |
| WP_006506696 | 638 | RRLKKKYALPDDKVKQILKL--KYKDWSRLSKKLLDGIVAD SV--TVLDVLE -------SRLNLMEIINDKDL | 705 |
| AIT42264 | 634 | ERLKTYAHLFDDKVMKOLKR-RRYTGWGRLSRKLINGIRDK QSGKTILDFLK -DGf---ANRNFMQLIHDDSL | 702 |
| WP_034440723 | 638 | RQLMKFKDKLSEKAINQLSK-KHYTGWGQLSEKLINGIRDE QSNKTILDYLI DNGcpkNMNRNFMQLINDDTL | 710 |
| AKQ21048 | 634 | ERLKTYAHLEDDKVMKOLKR-RRYTGWGRLSRKLINGIRDK QSGKTILDFLK -DGf---ANRNFMQLIHDDSL | 702 |
| WP_004636532 | 634 | KQLQTYSDTLSPEILKKLER-KHYTGWGRFSKKLINGLRDE GSNKTILDYLK DEGssgPTNRNFMQLIRDNTL | 706 |
| WP_002364836 | 642 | TQLSTFKGQFSAEVLKKLER-KHYTGWGRLSKKLINGIYDK ESGKTILGYLI DDGvskHYNRNFMQLINDSQL | 714 |
| WP_016631044 | 593 | TQLSTFKGQFSAEVLKKLER-KHYTGWGRLSKKLINGIYDK ESGKTILDYLV DDGvskHYNRNFMQLINDSQL | 665 |
| EMS75795 | 382 | TQLKKYQSVLGDGFFKKLVK-KHYTGWGRLSERLINGIRDK KTNKTILDYLI DDDfpyNRNRNFMQLINDDSL | 454 |
| WP_002373311 | 642 | TOLSTFKGQFSAEVLKKLER-KHYTGWGRLSKKLINGIYDK ESGKTILDYLV DDGvskHYNRNFMQLINDSQL | 714 |
| WP_002378009 | 642 | TOLSTFKGQFSAEVLKKLER-KHYTGWGRLSKKLINGIYDK ESGKTILDYLI DDGvskHYNRNFMQLINDSQL | 714 |
| WP_002407324 | 642 | TOLSTFKGQFSAEVLKKLER-KHYTGWGRLSKKLINGIYDK ESGKTILDYLV DDGvskHYNRNFMQLINDSQL | 714 |
| WP_002413717 | 642 | TOLSTFKGQFSAEVLKKLER-KHYTGWGRLSKKLINGIYDK ESGKTILDYLV DDGvSkHYNRNFMQLINDSQL | 714 |
| WP_010775580 | 644 | TOLSTFKGOFSEEVLKKLER-KHYTGWGRLSKKLINGIYDK ESGKTILDYLI DDGVSKHYNRNFMQLINDSQL | 716 |
| WP_010818269 | 642 | TOLSTFKGOFSAEVLKKLER-KHYTGWGRLSKKLINGIYDK ESGKTILGYLI DDGvskHYNRNFMQLINDSQL | 714 |
| WP_010824395 | 642 | TOLSTFKGOFSAEVLKKLER-KHYTGWGRLSKKLINGIYDK ESGKTILDYLI DDGvskHYNRNFMQLINDSQL | 714 |
| WP_016622645 | 642 | TOLSTFKGQFSAEVLKKLER-KHYTGWGRLSKKLINGIYDK ESGKTILDYLV DDGvSkHYNRNFMQLINDSQL | 714 |
| WP_033624816 | 642 | TQLSTFKGQFSAEVLKKLER-KHYTGWGRLSKKLINGIYDK ESGKTILDYLI DDGvskHYNRNFMQLINDSQL | 714 |
| WP_033625576 | 642 | TQLSTFKGOFSAEVLKKLER-KHYTGWGRLSKKLINGIYDK ESGKTILDYLI DDGvskHYNRNFMQLINDSQL | 714 |
| WP_033789179 | 642 | TOLSTFKGQFSEEVLKKLER-KHYTGWGRLSKKLINGIYDK ESGKTILDYLI DDGvskHYNRNFMQLINDSQL | 714 |
| WP_002310644 | 642 | TRLSHHEATLGKHIIKKLTK-KHYTGWGRLSKELIQGIRDK QSNKTILDYLI DDDfphHRNRNFMQLINDDSL | 714 |
| WP_002312694 | 643 | TRLSHHEATLGKHIIKKLTK-KHYTGWGRLSKELIQGIRDK QSNKTILDYLI DDDfphHRNRNFMQLINDDSL | 715 |
| WP_002314015 | 643 | TRLSHHEATLGKHIIKKLTK-KHYTGWGRLSKELIQGIRDK QSNKTILDYLI DDDfphHRNRNFMQLINDDSL | 715 |
| WP_002320716 | 643 | TRLSHHEATLGKHIIKKLTK-KHYTGWGRLSKELIQGIRDK QSNKTILDYLI DDDfphHRNRNFMQLINDDSL | 715 |
| WP_002330729 | 642 | TRLSHHEATLGKHIIKKLTK-KHYTGWGRLSKELIQGIRDK QSNKTILDYLI DDDfphHRNRNFMQLINDDSL | 714 |
| WP_002335161 | 643 | TRLSHHEATLGKHIIKKLTK-KHYTGWGRLSKELIQGIRDK QSNKTILDYLI DDDfphHRNRNFMQLINDDSL | 715 |
| WP_002345439 | 643 | TRLSHHEATLGKHIIKKLTK-KHYTGWGRLSKELIQGIRDK QSNKTILDYLI DDDfphHRNRNCMQLINDDSL | 715 |
| WP_034867970 | 638 | HQLSKYQEVFGEKLLKEFAR-KHYTGWGRFSAKLIHGIRDR KINKTILDYLI DDDvpaNRNRNLMQLINDEHL | 710 |
| WP_047937432 | 643 | TRLSHHEATLGKHIIKKLTK-KHYTGWGRLSKELIQGIRDK QSNKTILDYLI DDDfphHRNRNFMQLINDDSL | 715 |
| WP_010720994 | 638 | HQLSKYQEVFGEKLLKEFAR-KHYTGWGRFSAKLIHGIRDR KINKTILDYLI DDDvpaNRNRNLMQLINDEHL | 710 |
| WP_010737004 | 638 | HQLSKYQEVFGEKLLKEFAR-KHYTGWGRFSAKLIHGIRDR KINKTILDYLI DDDvpaNRNRNLMQLINDEHL | 710 |
| WP_034700478 | 638 | HQLSKYQEVFGEKLLKEFAR-KHYTGWGRFSAKLIHGIRDR KTNKTILDYLI DDDvpaNRNRNLMQLINDEHL | 710 |
| WP_007209003 | 635 | NQLEQLPLNLSTKTIKALSR-RKYTGWGRLSARLIDGIHDK NSGKTILDYLI DESdsyIVNRNFMQLINDDHL | 707 |
| WP_023519017 | 632 | EQLKPYETVLGLPAIKKLAK-KHYTGWGRLSEKMIQGMREK QSRKTILDYLI DDDfpcNRNRNFMQLINDDHL | 704 |
| WP_010770040 | 635 | EQLKKYTYLFDEEVLKKLER-RHYTGWGRLSAKLLIGIKEK RTHKTILDYLI DDGgkqPINRNLMQLINDSDL | 707 |
| WP_048604708 | 631 | EQLSKFSDRLSEKTIKDLER-RHYTGWGRLSAKLINGIHDK QSNKTILDYLI DDApkkNINRNFMQLINDNRL | 703 |
| WP_010750235 | 637 | TQLKKYQRILGEEIFKKLVK-KKYTGWGRLSKRLINGIRDQ KINKTILDYLI DDDfpyNRNRNFMQLINDDHL | 709 |
| AII16583 | 673 | ERLKTYAHLFDDKVMKOLKR-RRYTGWGRLSRKLINGIRDK QSGKTILDFLK -DGf---ANRNFMQLIHDDSL | 741 |
| WP_029073316 | 648 | RRLKKEYDLDEEKIKKILKL--KYSGWSRLSKKLLSGIKTK RTPETVLEVME -------TNMNLMQVINDEKL | 717 |
| WP_031589969 | 648 | RRLKKEYDLDEEKIKKILKL--KYSGWSRLSKKLLSGIKTK RTPETVLEVME -------TNMNLMQVINDEKL | 717 |
| KDA45870 | 631 | RRLENYRDFLGEDILRKLSR-KKYTGWGRLSAKLLDGIYDK KTHKTILDCLM EDYS-----QNFMQLINDDTY | 698 |
| WP_039099354 | 651 | AKLNEIDWLTDQQRVOLAAK--RYRGWGRLSAKLLTQIVN- ANGQRIMDLLW -------TTDNFMRIVHSE-- | 712 |
| AKP02966 | 633 | EKLHSSNYSYTSDQIKKISN-MRYKGWGRLSKKILTCITTE TNTPKSLQLSN -DLm-wTTNNNFISIISNDKY | 706 |
| WP_010991369 | 638 | EQLQQFSDVLDGVVLKKLER-RHYTGWGRLSAKLLMGIRDK QSHLTILDYLM DDG----LNRNLMQLINDSNL | 706 |
| WP_033838504 | 638 | EQLQQFSDVLDGVVLKKLER-RHYTGWGRLSAKLLMGIRDK QSHLTILDYLM DDG----LNRNLMQLINDSNL | 706 |
| EHN60060 | 641 | EQLQQFSDVLDGVVLKKLER-RHYTGWGRLSAKLLMGIRDK QSHLTILDYLM DDG----LNRNLMQLINDSNL | 709 |
| EFR89594 | 407 | EQLQQFSDVLDGVVLKKLER-RHYTGWGRLSAKLLMGIRDK QSHLTILDYLM DDG----LNRNLMQLINDSNL | 475 |
| WP_038409211 | 638 | EQLQSFSDVLDGTILKKLER-RHYTGWGRLSAKLLTGIRDK HSHLTILDYLM DDG----LNRNLMQLINDSNL | 706 |
| EFR95520 | 257 | EQLQSFSDVLDGTILKKLER-RHYTGWGRLSAKLLTGIRDK HSHLTILDYLM DDG----LNRNLMQLINDSNL | 325 |
| WP_003723650 | 638 | EQLQQFSDVLDGGVLKKLER-RHYTGWGRLSAKLLVGIREK QSHLTILDYLM DDG----LNRNLMQLINDSNL | 706 |
| WP_003727705 | 638 | EQLEQFSDVLDGVVLKKLER-RHYTGWGRLSAKLLVGIRDK QSHLTILDYLM DDG----LNRNLMQLINDSNL | 706 |
| WP_003730785 | 638 | EQLEQFSDVLDGVVLKKLER-RHYTGWGRLSAKLLVGIRDK QSHLTILDYLM DDG----LNRNLMQLINDSNL | 706 |
| WP_003733029 | 638 | EQLQQFSDVLDGTVLKKLER-RHYTGWGRLSAKLLVGIRDK QSHLTILDYLM DDG----LNRNLMQLINDSNL | 706 |
| WP_003739838 | 638 | EQLQQFSDVLDGAVLKKLER-RHYTGWGRLSAKLLVGIRDK QSHLTILDYLM DDG----LNRNLMQLINDSNL | 706 |
| WP_014601172 | 638 | EQLQQFSDVLDGGVLKKLER-RHYTGWGRLSAKLLVGIREK QSHLTILDYLM DDG----LNRNLMQLINDSNL | 706 |
| WP_023548323 | 638 | EQLQQFSDVLDGTVLKKLER-RHYTGWGRLSAKLLVGIRDK QSHLTILDYLM DDG----LNRNLMQLINDSNL | 706 |
| WP_031665337 | 638 | EQLQQFSDVLDGVVLKKLER-RHYTGWGRLSAKLLVGIRDK QSHLTILEYLM DDG----LNRNLMQLINDSNL | 706 |
| WP_031669209 | 638 | EQLQQFSDVLDGTVLKKLER-RHYTGWGRLSAKLLVGIRDK QSHLTILDYLM DDG----LNRNLMQLINDSNL | 706 |
| WP_033920898 | 638 | EQLQQFSDVLDGTVLKKLER-RHYTGWGRLSAKLLVGIRDK QSHLTILDYLM DDG----LNRNLMQLINDSNL | 706 |
| AKI42028 | 641 | EQLQQFSDVLDGGVLKKLER-RHYTGWGRLSAKLLVGIREK QSHLTILDYLM DDG----LNRNLMQLINDSNL | 709 |
| AKI50529 | 641 | EQLQQFSDVLDGTVLKKLER-RHYTGWGRLSAKLLVGIRDK QSHLTILDYLM DDG----LNRNLMQLINDSNL | 709 |
| EFR83390 | 86 | EQLQQFSDVLDGVVLKKLER-RHYTGWGRLSAKLLVGIRDK QSHLTILEYLM DDG----LNRNLMQLINDSNL | 154 |
| WP_046323366 | 638 | ERLQEFSNVLDEAVLKKLER-RHYTGWGRLSAKLLIGIRDK ESHLTILDYLM DDK----HNRNLMQLINDSNL | 706 |
| AKE81011 | 650 | ERLKTYAHLFDDKVMKOLKR-RRYTGWGRLSRKLINGIRDK QSGKTILDFLK -DGf---ANRNFMOLIHDDSL | 718 |
| CUO82355 | 642 | RRLKKKYALPDDKIKQILKL--KYKDWSRLSKKLLDGIVAD SV--TVLDVLE -------SRLNLMEIINDKEL | 709 |
| WP_033162887 | 645 | RRLKKVYQLDDLLVDKILKL--NYTGWSRLSEKLLTGMTAD KA--TVLFVLE -------SNKNLMEIINDEKI | 712 |
| AGZ01981 | 667 | ERLKTYAHLFDDKVMKOLKR-RRYTGWGRLSRKLINGIRDK QSGKTILDFLK -DGf---ANRNFMQLIHDDSL | 735 |
| AKA60242 | 634 | ERLKTYAHLFDDKVMKOLKR-RRYTGWGRLSRKLINGIRDK QSGKTILDFLK -DGf---ANRNFMQLIHDDSL | 702 |
| AKS40380 | 634 | ERLKTYAHLEDDKVMKOLKR-RRYTGWGRLSRKLINGIRDK QSGKTILDFLK -DGf---ANRNFMQLIHDDSL | 702 |
| 4UN5_B | 638 | ERLKTYAHLEDDKVMKOLKR-RRYTGWGRLSRKLINGIRDK QSGKTILDFLK -DGf---ANRNFMQLIHDDSL | 706 |
| WP_010922251 | 703 | [chemical structure] | 777 |
| WP_039695303 | 707 | PFKQIIQKSQVVG-DVDD-IEAVVHDLPGSPAIKKGILQSVKIVDELVKVMG-GNPDNIVIEMARENQ TTNRGRSQS | 780 |
| WP_045635197 | 702 | SFKEIIQKAQVIG-KTDD-VKQVVQELSGSPAIKKGILQSIKIVDELVKVMG-HAPESIVIEMARENQ TTARGKKNS | 775 |
| 5AXW_A | 427 | VPKKVDLSQQKEI---PT---TLVDDFILSPVVKRSFIQSIKVINAIIKKYG--LPNDIIIELAREKN --------S | 487 |
| WP_009880683 | 387 | TFKEDLQKAQVSG-QGDS-LHEHIANLAGSPAIKKGILQTVKVVDELVKVMGrHKPENIVIEMARENQ TTOKGQKNS | 461 |
| WP_010922251 | 703 | TFKEDIQKAQVSG-QGDS-LHEHIANLAGSPAIKKGILQTVKVVDELVKVMGrHKPENIVIEMARENQ TTOKGQKNS | 777 |
| WP_011054416 | 703 | TFKEDIQKAQVSG-QGDS-LHEHIANLAGSPAIKKGILQTVKVVDELVKVMGrHKPENIVIEMARENQ TTOKGQKNS | 777 |
| WP_011284745 | 703 | TFKEDIQKAQVSG-QGDS-LHEHIANLAGSPAIKKGILQTVKVVDELVKVMGrHKPENIVIEMARENQ TTQKGQKNS | 777 |
| WP_011285506 | 703 | TFKEDIQKAQVSG-QGDS-LHEHIANLAGSPAIKKGILQTVKVVDELVKVMGrHKPENIVIEMARENQ TTQKGQKNS | 777 |
| WP_011527619 | 703 | TFKEDIQKAQVSG-QGDS-LHEHIANLAGSPAIKKGILQTVKVVDELVKVMGrHKPENIVIEMARENQ TTOKGQKNS | 777 |
| WP_012560673 | 703 | TFKEDLQKAQVSG-QGDS-LHEHIANLAGSPAIKKGILQTVKVVDELVKVMGrHKPENIVIEMARENQ TTOKGQKNS | 777 |
| WP_014407541 | 703 | TFKEDIQKAQVSG-QGHS-LHEQIANLAGSPAIKKGILQTVKIVDELVKVMG-HKPENIVIEMARENQ TTQKGQKNS | 776 |
| WP_020905136 | 703 | TFKEDIQKAQVSG-QGDS-LHEHIANLAGSPAIKKGILQTVKVVDELVKVMGrHKPENIVIEMARENQ TTOKGQKNS | 777 |
| WP_023080005 | 703 | TFKEAIQKAQVSG-QGHS-LHEQIANLAGSPAIKKGILQTVKIVDELVKVMG-HKPENIVIEMARENQ TTOKGQKNS | 776 |
| WP_023610282 | 703 | TFKEAIQKAQVSG-QGHS-LHEQIANLAGSPAIKKGILQTVKIVDELVKVMG-HKPENIVIEMARENQ TTQKGQKNS | 776 |
| WP_030125963 | 703 | TFKEDLQKAQVSG-QGDS-LHEHIANLAGSPAIKKGILQTVKVVDELVKVMGrHKPENIVIEMARENQ TTOKGQKNS | 777 |
| WP_030126706 | 703 | TFKEDIQKAQVSG-QGDS-LHEHIANLAGSPAIKKGILQTVKVVDELVKVMGrHKPENIVIEMARENQ TTOKGQKNS | 777 |
| WP_031488318 | 703 | TFKEDIQKAQVSG-QGDS-LHEHIANLAGSPAIKKGILQTVKVVDELVKVMGrHKPENIVIEMARENQ TTQKGQKNS | 777 |
| WP_032460140 | 703 | TFKEDLQKAQVSG-QGDS-LHEHIANLAGSPAIKKGILQTVKVVDELVKVMGrHKPENIVIEMARENQ TTQKGQKNS | 777 |
| WP_032461047 | 703 | TFKEDLQKAQVSG-QGDS-LHEHIANLAGSPAIKKGILQTVKVVDELVKVMGrHKPENIVIEMARENQ TTOKGQKNS | 777 |
| WP_032462016 | 703 | TFKEDIQKAQVSG-QGDS-LHEHIANLAGSPAIKKGILQTVKVVDELVKVMGrHKPENIVIEMARENQ TTOKGQKNS | 777 |
| WP_032462936 | 703 | TFKEDIQKAQVSG-QGDS-LHEHIANLAGSPAIKKGILQTVKVVDELVKVMGrHKPENIVIEMARENQ TTOKGQKNS | 777 |
| WP_032464890 | 703 | TFKEDIQKAQVSG-QGDS-LHEHIANLAGSPAIKKGILQTVKVVDELVKVMGrHKPENIVIEMARENQ TTOKGQKNS | 777 |
| WP_033888930 | 528 | TFKEDIQKAQVSG-QGDS-LHEHIANLAGSPAIKKGILQTVKVVDELVKVMGrHKPENIVIEMARENQ TTOKGQKNS | 602 |
| WP_038431314 | 703 | TFKEDIQKAQVSG-QGDS-LHEHIANLAGSPAIKKGILQTVKVVDELVKVMGrHKPENIVIEMARENQ TTQKGQKNS | 777 |
| WP_038432938 | 703 | TFKEAIQKAQVSG-QGHS-LHEQIANLAGSPAIKKGILQTVKIVDELVKVMG-HKPENIVIEMARENQ TTQKGQKNS | 776 |
| WP_038434062 | 703 | TFKEDIQKAQVSG-QGDS-LHEHIANLAGSPAIKKGILQTVKIVDELVKVMGrHKPENIVIEMARENQ TTQKGQKNS | 777 |
| BAQ51233 | 614 | TFKEDIQKAQVSG-QGDS-LHEHIANLAGSPAIKKGILQTVKVVDELVKVMGrHKPENIVIEMARENQ TTOKGQKNS | 688 |
| KGE60162 | | -------------------------------------------------------------------- --------- | |
| KGE60856 | | -------------------------------------------------------------------- --------- | |
| WP_002989955 | 703 | TFKEDIQKAQVSG-QGDS-LHEHIANLAGSPAIKKGILQTVKVVDELVKVMGrHKPENIVIEMARENQ TTQKGQKNS | 777 |
| WP_003030002 | 704 | SFKEEIARAQIIG-DVDD-IANVVHDLPGSPAIKKGILQSVKIVDELVKVMG-HNPANIIIEMARENQ MTDKGRRNS | 777 |
| WP_003065552 | 707 | PFKQIIQKSQVVG-DVDD-IEAVVHDLPGSPAIKKGILQSVKIVDELVKVMG-DNPDNIVIEMARENQ TTNRGRSQS | 780 |
| WP_001040076 | 702 | SFKPIIDKARTGS-HSDN-LKEVIGELAGSPAIKKGILQSLKIVDELVKVMG-YEPEQIVVEMARENQ TTAKGLSRS | 775 |
| WP_001040078 | 705 | SFKSIISKAQAGS-HSDN-LKEVVGELAGSPAIKKGILQSLKIVDELVKVMG-YEPEQIVVEMARENQ TTNQGRRNS | 778 |
| WP_001040080 | 705 | SFKSIISKAQAGS-HSDN-LKEVVGELAGSPAIKKGILQSLKIVDELVKVMG-YEPEQIVVEMARENQ TTNQGRRNS | 778 |
| WP_001040081 | 705 | SEKSIISKAQAGS-HSDN-LKEVVGELAGSPAIKKGILQSLKIVDELVKVMG-YEPEQIVVEMARENQ TTNQGRRNS | 778 |
| WP_001040083 | 705 | SEKSIISKAQAGS-HSDN-LKEVVGELAGSPAIKKGILQSLKIVDELVKVMG-YEPEQIVVEMARENQ TTNQGRRNS | 778 |
| WP_001040085 | 705 | SFKSIISKAQAGS-HSDN-LKEVVGELAGSPAIKKGILQSLKIVDELVKVMG-YEPEQIVVEMARENQ TTNQGRRNS | 778 |
| WP_001040087 | 705 | SFKSIISKAQAGS-HSDN-LKEVVGELAGSPAIKKGILQSLKIVDELVKVMG-YEPEQIVVEMARENQ TTNQGRRNS | 778 |
| WP_001040088 | 705 | SEKSIISKAQAGS-HSDN-LKEVVGELAGSPAIKKGILQSLKIVDELVKVMG-YEPEQIVVEMARENQ TTNQGRRNS | 778 |
| WP_001040089 | 705 | SFKSIISKAQAGS-HSDN-LKEVVGELAGSPAIKKGILQSLKIVDELVKVMG-YEPEQIVVEMARENQ TTNQGRRNS | 778 |
| WP_001040090 | 705 | SFKSIISKAQAGS-HSDN-LKEVVGELAGSPAIKKGILQSLKIVDELVKVVG-YEPEQIVVEMARENQ TTNQGRRNS | 778 |
| WP_001040091 | 705 | SEKSIISKAQAGS-HSDN-LKEVVGELAGSPAIKKGILQSLKIVDELVKVMG-YEPEQIVVEMARENQ TTNQGRRNS | 778 |
| WP_001040092 | 705 | SFKSIISKAQSGS-HSDN-LKEVVGELAGSPAIKKGILQSLKIVDELVKVMG-YEPEQIVVEMARENQ TTNQGRRNS | 778 |
| WP_001040094 | 702 | SFKPIIDKARTGS-HSDN-LKEVVGELAGSPAIKKGILQSLKIVDELVKVMG-YEPEQIVVEMARENQ TTAKGLSRS | 775 |
| WP_001040095 | 702 | SFKPIIDKARTGS-HLDN-LKEVVGELAGSPAIKKGILQSLKIVDELVKVMG-YEPEQIVVEMARENQ TTAKGLSRS | 775 |
| WP_001040096 | 702 | SFKPIIDKARTGS-HLDN-LKEVVGELAGSPAIKKGILQSLKIVDELVKVMG-YEPEQIVVEMARENQ TTAKGLSRS | 775 |
| WP_001040097 | 702 | SFKPIIDKARTGS-HSDN-LKEVVGELAGSPAIKKGILQSLKIVDELVKVMG-YEPEQIVVEMARENQ TTAKGLSRL | 775 |
| WP_001040098 | 702 | SFKPIIDKARTGS-HSDN-LKEVVGELAGSPAIKKGILQSLKIVDELVKVMG-YEPEQIVVEMARENQ TTAKGLSRS | 775 |
| WP_001040099 | 702 | SFKPIIDKARTGS-HSDN-LKEVVGELAGSPAIKKGILQSLKIVDELVKVMG-YEPEQIVVEMARENQ TTAKGLSRS | 775 |
| WP_001040100 | 702 | SFKPIIDKARTGS-HSDN-LKEVVGELAGSPAIKKGILQSLKIVDELVKVMG-YEPEQIVVEMARENQ TTAKGLSRS | 775 |
| WP_001040104 | 705 | SFKSIISKAQAGS-HSDN-LKEVVGELAGSPAIKKGILQSLKIVDELVKVMG-YEPEQIVVEMARENQ TTNQGRRNS | 778 |
| WP_001040105 | 705 | SEKSIISKAQAGS-HSDN-LKEVVGELAGSPAIKKGILQSLKIVDELVKVMG-YEPEQIVVEMARENQ TTNQGRRNS | 778 |
| WP_001040106 | 705 | SFKPIIDKAQAGS-HSDN-LKEVVGELAGSPAIKKGILQSLKIVDELVKVMG-YEPEQVVVEMARENQ TTNQGRRNT | 778 |
| WP_001040107 | 705 | SFKPIIDKAQAGS-HSDN-LKEVVGELAGSPAIKKGILQSLKIVDELVKVMG-YEPEQVVVEMARENQ TTNQGRRNT | 778 |
| WP_001040108 | 705 | SFKPIIDKAQAGS-HSDN-LKEVVGELAGSPAIKKGILQSLKIVDELVKVMG-YEPEQVVVEMARENQ TTNQGRRNT | 778 |
| WP_001040109 | 705 | SFKPIIDKAQAGS-HSDN-LKEVVGELAGSPAIKKGILQSLKIVDELVKVMG-YEPEQVVVEMARENQ TTNQGRRNT | 778 |
| WP_001040110 | 705 | SFKPIIDKAQAGS-HSDN-LKEVVGELAGSPAIKKGILQSLKIVDELVKVMG-YEPEQVVVEMARENQ TTNQGRRNT | 778 |
| WP_015058523 | 705 | SFKSIISKAQSGS-HSDN-LKEVVGELAGSPAIKKGILQSLKIVDELVKVMG-YEPEQIVVEMARENQ TTNQGRRNS | 778 |
| WP_017643650 | 702 | SFKPIIDKARTGS-HSDN-LKEVVGELAGSPAIKKGILQSLKIVDELVKVMG-YEPEQIVVEMARENQ TTAKGLSRL | 775 |
| WP_017647151 | 705 | SFKSIISKAQAGS-HSDN-LKEVVGELAGSPAIKKGILQSLKIVDELVKVMG-YEPEQIVVEMARENQ TTNQGRRNS | 778 |
| WP_017648376 | 705 | SFKSIISKAQAGS-HSDN-LKEVVGELAGSPAIKKGILQSLKIVDELVKVMG-YEPEQIVVEMARENQ TTNQGRRNS | 778 |
| WP_017649527 | 705 | SFKSIISKAQAGS-HSDN-LKEVVGELAGSPAIKKGILQSLKIVDELVKVMG-YEPEQIVVEMARENQ TINQGRRNS | 778 |
| WP_017771611 | 705 | SFKPIIDKAQAGS-HSDN-LKEVVGELAGSPAIKKGILQSLKIVDELVKVMG-YEPEQVVVEMARENQ TTNQGRRNT | 778 |
| WP_017771984 | 705 | SEKSIISKAQAGS-HSDN-LKEVVGELAGSPAIKKGILQSLKIVDELVKVMG-YEPEQIVVEMARENQ TTNQGRRNS | 778 |
| CFQ25032 | 705 | SFKSIISKAQAGS-HSDN-LKEVVGELAGSPAIKKGILQSLKIVDELVKVMG-YEPEQIVVEMARENQ TTNQGRRNS | 778 |
| CFV16040 | 705 | SEKSIISKAQAGS-HSDN-LKEVVGELAGSPAIKKGILQSLKIVDELVKVMG-YEPEQIVVEMARENQ TTNQGRRNS | 778 |
| KLJ37842 | 705 | SFKSIISKAQAGS-HSDN-LKEVVGELAGSPAIKKGILQSLKIVDELVKVMG-YEPEQIVVEMARENQ TTNQGRRNS | 778 |
| KLJ72361 | 705 | SFKSIISKAQAGS-HSDN-LKEVVGELAGSPAIKKGILQSLKIVDELVKVMG-YEPEQIVVEMARENQ TTNQGRRNS | 778 |
| KLL20707 | 719 | SFKSIISKAQAGS-HSDN-LKEVVGELAGSPAIKKGILQSLKIVDELVKVMG-YEPEQIVVEMARENQ TTNQGRRNS | 792 |
| KLL42645 | 705 | SFKPIIDKAQAGS-HSDN-LKEVVGELAGSPAIKKGILQSLKIVDELVKVMG-YEPEQVVVEMARENQ TTNKGRRNT | 778 |
| WP_047207273 | 705 | SFKSIISKAQAGS-HSDN-LKEVVGELAGSPAIKKGILQSLKIVDELVKVMG-YEPEQIVVEMARENQ TTNQGRRNS | 778 |
| WP_047209694 | 702 | SFKPIIDKARTGS-HSDN-LKEVVGELAGSPAIKKGILQSLKIVDELVKVMG-YEPEQIVVEMARENQ TTAKGLSRS | 775 |
| WP_050198062 | 705 | SEKSIISKAQAGS-HSDN-LKEVVGELAGSPAIKKGILQSLKIVDELVKVMG-YEPEQIVVEMARENQ TTNQGRRNS | 778 |
| WP_050201642 | 705 | SFKSIISKAQAGS-HSDN-LKEVVGELAGSPAIKKGILQSLKIVDELVKVMG-YEPEQIVVEMARENQ TTNQGRRNS | 778 |
| WP_050204027 | 705 | SFKPIIDKAQAGS-HSDN-LKEVVGELAGSPAIKKGILQSLKIVDELVKVMG-YEPEQVVVEMARENQ TTNQGRRNT | 778 |
| WP_050881965 | 705 | SEKSIISKAQAGS-HSDN-LKEVVGELAGSPAIKKGILQSLKIVDELVKVMG-YEPEQIVVEMARENQ TTNQGRRNS | 778 |
| WP_050886065 | 705 | SEKSIISKAQAGS-HSDN-LKEVVGELAGSPAIKKGILQSLKIVDELVKVMG-YEPEQIVVEMARENQ TTNQGRRNS | 778 |
| AHN30376 | 705 | SFKSIISKAQSGS-HSDN-LKEVVGELAGSPAIKKGILQSLKIVDELVKVMG-YEPEQIVVEMARENQ TTNQGRRNS | 778 |
| EAO78426 | 705 | SFKSIISKAQAGS-HSDN-LKEVVGELAGSPAIKKGILQSLKIVDELVKVMG-YEPEQIVVEMARENQ TTNQGRRNS | 778 |
| CCW42055 | 705 | SFKSIISKAQSGS-HSDN-LKEVVSELAGSPAIKKGILQSLKIVDELVKVMG-YKPEQIVVEMARENQ TTNQGRRNS | 778 |
| WP_003041502 | 704 | SFKEEIAKAQIIG-DVDD-IANVVHDLPGSPAIKKGILQSVKIVDELVKVMG-HNPANIIIEMARENQ TTDRGRRNS | 777 |
| WP_037593752 | 705 | SFKEEIARAQIIG-DVDD-IANVVHDLPGSPAIKKGILQSVKIVDELVKVMG-HNPANIIIEMARENQ TTDKGRRNS | 778 |
| WP_049516684 | 705 | SFKEEIARAQIIG-DVDD-IANVVHDLPGSPAIKKGILQSVKIVDELVKVMG-HNPANIIIEMARENQ TTDKGRRNS | 778 |
| GAD46167 | 704 | SFKEEIARAQIIG-DVDD-IANVVHDLPGSPAIKKGILQSVKIVDELVKVMG-HNPANIIIEMARENQ TTDKGRRNS | 777 |
| WP_018363470 | 705 | SFKQIIQEAQVVG-DVDD-IETVVHDLPGSPAIKKGILQSVKIVDELIKVMG-DNPDNIVIEMARENQ TTNRGRSQS | 778 |
| WP_003043819 | 713 | TFKEEIEKAQVSG-QGDS-LHEQIADLAGSPAIKKGILQTVKIVDELVKVMG-HKPENIVIEMARENQ TTTKGLQQS | 786 |
| WP_006269658 | 704 | SFKEEIARAQIID-DVDD-IANVVHDLPGSPAIKKGILQSVKIVDELVKVMG-HNPANIIIEMARENQ TTDKGRRNS | 777 |
| WP_048800889 | 704 | PFKQIIKDAQAID-DVDD-IELIVHDLPGSPAIKKGILQSIKIVDELVKVMG-YNPDNIVIEMARENQ TTTKGRRNS | 777 |
| WP_012767106 | 703 | TFKEAIQKAQVSG-QGHS-LHEQIANLAGSPAIKKGILQSVKVVDELVKVMG-HKPENIVIEMARENQ TTQKGQKNS | 776 |
| WP_014612333 | 703 | TFKEAIQKAQVSG-QGHS-LHEQIANLAGSPAIKKGILQSVKVVDELVKVMG-HKPENIVIEMARENQ TTOKGQKNS | 776 |
| WP_015017095 | 703 | TFKEAIQKAQVSG-QGHS-LHEQIANLAGSPAIKKGILQSVKVVDELVKVMG-HKPENIVIEMARENQ TTOKGQKNS | 776 |
| WP_015057649 | 703 | TFKEAIQKAQVSG-QGHS-LHEQIANLAGSPAIKKGILQSVKVVDELVKVMG-HKPENIVIEMARENQ TTOKGQKNS | 776 |
| WP_048327215 | 703 | TFKEAIQKAQVSG-QGHS-LHEQIANLAGSPAIKKGILQSVKVVDELVKVMG-HKPENIVIEMARENQ TTQKGQKNS | 776 |
| WP_049519324 | 703 | TFKEAIQKAQVSG-QGHS-LHEQIANLAGSPAIKKGILQSVKVVDELVKVMG-HKPENIVIEMARENQ TTOKGQKNS | 776 |
| WP_012515931 | 703 | SFIDEIAKAQVIG-KTEY-SKDLVGNLAGSPAIKKGISQTIKIVDELVKIMG-YLPQQIVIEMARENQ TTAQGIKNA | 776 |
| WP_021320964 | 703 | SFIDEIAKAQVIG-KTEY-SKDLVGNLASSPAIKKGISQTIKIVDELVKIMG-YLPQQIVIEMARENQ TTAQGIKNA | 776 |
| WP_037581760 | 703 | SFIDEIAKAQVIG-KTEY-SKDLVGNLAGSPAIKKGISQTIKIVDELVKIMG-YLPQQIVIEMARENQ TTAQGIKNA | 776 |
| WP_004232481 | 704 | SFKTTIQEAQVVG-DVDD-IEAVVHDLPGSPAIKKGILQSVKIVDELVKVMG-HNPQNIVIEMARENQ ITGYGRNRS | 777 |
| WP_009854540 | 705 | PFKQIIQKSQVVG-DVDD-IEAVVHDLPGSPAIKKGILQSVKIVDELVKVMG-DNPDNIVIEMARENQ TTNRGRSQS | 778 |
| WP_012962174 | 705 | PFKQIIKDAQIIG-DIDD-VTSVVRELPGSPAIKKGILQSVKIVDELVKVMG-HNPDNIVIEMARENQ TTNRGRNOS | 778 |
| WP_039695303 | 707 | PFKQIIQKSQVVG-DVDD-IEAVVHDLPGSPAIKKGILQSVKIVDELVKVMG-GNPDNIVIEMARENQ TTNRGRSQS | 780 |
| WP_014334983 | 704 | SFKTIIQEAQVVG-DVDD-IEAVVHDLPGSPAIKKGILQSVKIVDELVKVMG-DNPDNIVIEMARENQ TTGYGRNKS | 777 |
| WP_003099269 | 703 | DFAKIIKNEQEKTiKNES-LEETIANLAGSPAIKKGILQSIKIVDEIVKIMG-QNPDNIVIEMARENQ STMQGIKNS | 777 |
| AHY15608 | 703 | DFAKIIKNEQEKTiKNES-LEETIANLAGSPAIKKGILQSIKIVDEIVKIMG-QNPDNIVIEMARENQ STMQGIKNS | 777 |
| AHY17476 | 703 | DFAKIIKNEQEKTiKNES-LEETIANLAGSPAIKKGILQSIKIVDEIVKIMG-QNPDNIVIEMARENQ STMQGIKNS | 777 |
| ESR09100 | | -------------------------------------------------------------------- --------- | |
| AGM98575 | 703 | DFAKIIKNEQEKTiKNES-LEETIANLAGSPAIKKGILQSIKIVDEIVKIMG-QNPDNIVIEMARENQ STMQGIKNS | 777 |
| ALF27331 | 704 | SFKEEIAKAQVIG-ETDN-LNQVVSDIAGSPAIKKGILQSLKIVDELVKIMG-HQPENIVVEMARENQ FTNQGRRNS | 777 |
| WP_018372492 | 717 | DFKEIIRKAQTIE-NIDT-NQALVSSLPGSPAIKKGILQSLNIVDEIIAIMG-YAPTNIVIEMARENQ TTQKGRDNS | 790 |
| WP_045618028 | 703 | SFKEIIQKAQVVG-KIND-VKQVVQELPGSPAIKKGILQSIKLVDELVKVMG-HAPESIVIEMARENQ TTARGKKNS | 776 |
| WP_045635197 | 702 | SFKEIIQKAQVIG-KTDD-VKQVVQELSGSPAIKKGILQSIKIVDELVKVMG-HAPESIVIEMARENQ TTARGKKNS | 775 |
| WP_002263549 | 704 | SFKEEIAKAQVIG-ETDN-LNQVVSDIAGSPAIKKGILQSLKIVDELVKIMG-HQPENIVVEMARENQ FTNQGRRNS | 777 |
| WP_002263887 | 704 | SFKEEIAKAQVIG-ETDN-LNQVVSDIAGSPAIKKGILQSLKIVDELVKIMG-HQPENIVVEMARENQ FTNQGRRNS | 777 |
| WP_002264920 | 704 | SFKEEIAKAQVIG-ETDN-LNQVVSDIAGSPAIKKGILQSLKIVDELVKIMG-HQPENIVVEMARENQ FTNQGRRNS | 777 |
| WP_002269043 | 704 | SFKEEIAKAQVIG-ETDN-LNQVVSDIAGSPAIKKGILQSLKIVDELVKIMG-HQPENIVVEMARENQ FTNQGRRNS | 777 |
| WP_002269448 | 704 | SFKEEIAKAQVIG-ETDN-LNQVVSDIAGSPAIKKGILQSLKIVDELVKIMG-HQPENIVVEMARENQ FTNQGRONS | 777 |
| WP_002271977 | 704 | SFKEEIAKAQVIG-ETDN-LNQVVSDIAGSPAIKKGILQSLKIVDELVKIMG-HQPENIVVEMARENQ FTNQGRRNS | 777 |
| WP_002272766 | 704 | SFKEEIAKAQVIG-ETDN-LNQVVSDIAGSPAIKKGILQSLKIVDELVKIMG-HQPENIVVEMARENQ FTNQGRRNS | 777 |
| WP_002273241 | 704 | SFKEEIAKAQVIG-ETDN-LNQVVSDIAGSPAIKKGILQSLKIVDELVKIMG-HQPENIVVEMARENQ FTKQGRRNS | 777 |
| WP_002275430 | 704 | SFKEEIAKAQVIG-ETDN-LNQVVSDIAGSPAIKKGILQSLKIVDELVKIMG-HQPENIVVEMARENQ FTNQGRRNS | 777 |
| WP_002276448 | 704 | SFKEEIAKAQVIG-ETDN-LNQVVSDIAGSPAIKKGILQSLKIVDELVKIMG-HQPENIVVEMARENQ FTKQGRRNS | 777 |
| WP_002277050 | 705 | TFKDDIVKAQYVD-NSDD-LHQVVQSLAGSPAIKKGILQSLKIVDELVKVMG-KEPEQIVVEMARENQ TTAKGRRNS | 778 |
| WP_002277364 | 704 | SFKEEIAKAQVIG-ETDN-LNQVVSDIAGSPAIKKGILQSLKIVDELVKIMG-HQPENIVVEMARENQ FTNQGRRNS | 777 |
| WP_002279025 | 704 | SFKEEIAKAQVIG-ETDN-LNQVVSDIAGSPAIKKGILQSLKIVDELVKIMG-HQPENIVVEMARENQ FTNQGRRNS | 777 |
| WP_002279859 | 704 | SFKEEIAKAQVIG-ETDN-LNQVVSDIAGSPAIKKGILQSLKIVDELVKIMG-HQPENIVVEMARENQ FTNQGRRNS | 777 |
| WP_002280230 | 704 | SFKEEIAKAQVIG-ETDN-LNQVVSDIAGSPAIKKGILQSLKIVDELVKIMG-HQPENIVVEMARENQ FTKQGRRNS | 777 |
| WP_002281696 | 704 | SFKEEIAKAQVIG-ETDN-LNQVVSDIAGSPAIKKGILQSLKIVDELVKIMG-HQPENIVVEMARENQ FTNQGRRNS | 777 |
| WP_002282247 | 705 | TFKDDIVKAQYVD-NSDD-LHQVVQSLAGSPAIKKGILQSLKIVDELVKVMG-KEPEQIVVEMARENQ TTAKGRRNS | 778 |
| WP_002282906 | 704 | SFKEEIAKAQVIG-ETDN-LNQVVSDIAGSPAIKKGILQSLKIVDELVKIMG-HQPENIVVEMARENQ FTNQGRRNS | 777 |
| WP_002283846 | 704 | SFKEEIAKAQVIG-ETDN-LNQVVSDIAGSPAIKKGILQSLKIVDELVKIMG-HQPENIVVEMARENQ FTNQGRRNS | 777 |
| WP_002287255 | 704 | SFKEEIAKAQVIG-ETDN-LNQVVSDIAGSPAIKKGILQSLKIVDELVKIMG-HQPENIVVEMARENQ FTNQGRRNS | 777 |
| WP_002288990 | 704 | SFKEEIAKAQVIG-ETDN-LNQVVSDIAGSPAIKKGILQSLKIVDELVKIMG-HQPENIVVEMARENQ FTNQGRRNS | 777 |
| WP_002289641 | 704 | SFKEEIAKAQVIG-ETDN-LNQVVSDIAGSPAIKKGILQSLKIVDELVKIMG-HQPENIVVEMARENQ FTNQGRRNS | 777 |
| WP_002290427 | 704 | SFKEEIAKAQVIG-ETDN-LNQVVSDIAGSLAIKKGILQSLKIVDELVKIMG-HQPENIVVEMARENQ FTNQGRRNS | 777 |
| WP_002295753 | 704 | SFKEEIAKAQVIG-ETDN-LNQVVSDIAGSPAIKKGILQSLKIVDELVKIMG-HQPENIVVEMARENQ FTKQGRRNS | 777 |
| WP_002296423 | 704 | SFKEEIAKAQVIG-ETDN-LNQVVSDIAGSPAIKKGILQSLKIVDELVKIMG-HQPENIVVEMARENQ FTNQGRRNS | 777 |
| WP_002304487 | 714 | SFKEEIAKAQVIG-EMDG-LNQVVSDIAGSPAIKKGILQSLKIVDELVKVMG-HNPANIVIEMARENQ TTAKGRRSS | 787 |
| WP_002305844 | 704 | SFKEEIAKAQVIG-ETDN-LNQVVSDIAGSPAIKKGILQSLKIVDELVKIMG-HQPENIVVEMARENQ FTKQGRRNS | 777 |
| WP_002307203 | 704 | SFKEEIAKAQVIG-ETDN-LNQVVSDIAGSPAIKKGILQSLKIVDELVKIMG-HQPENIVVEMARENQ FTNQGRRNS | 777 |
| WP_002310390 | 704 | SFKEEIAKAQVIG-ETDN-LNQVVSDIAGSLAIKKGILQSLKIVDELVKIMG-HQPENIVVEMARENQ FTNQGRRNS | 777 |
| WP_002352408 | 704 | SFKEEIAKAQVIG-ETDN-LNQVVSDIAGSPAIKKGILQSLKIVDELVKIMG-HQPENIVVEMARENQ FTNOGORNS | 777 |
| WP_012997688 | 704 | SFKEEIAKAQVIG-ETDN-LNQVVSDIAGSPAIKKGILQSLKIVDELVKIMG-HQPENIVVEMARENQ FTNQGRRNS | 777 |
| WP_014677909 | 704 | SFKEEIAKAQVIG-ETDN-LNQVVSDIAGSPAIKKGILQSLKIVDELVKIMG-HQPENIVVEMARENQ FTNQGRRNS | 777 |
| WP_019312892 | 704 | SFKEEIAKAQVIG-ETDN-LNQVVSDIAGSPAIKKGILQSLKIVDELVKIMG-HQPENIVVEMARENQ FTNQGRRNS | 777 |
| WP_019313659 | 704 | SFKEEIAKAQVIG-ETDN-LNQVVSDIAGSPAIKKGILQSLKIVDELVKIMG-HQPENIVVEMARENQ FTNQGRRNS | 777 |
| WP_019314093 | 704 | SFKEEIAKAQVIG-ETDN-LNQVVSDIAGSPAIKKGILQSLKIVDELVKIMG-HQPENIVVEMARENQ FTNQGRRNS | 777 |
| WP_019315370 | 704 | SFKEEIAKAQVIG-ETDN-LNQVVSDIAGSPAIKKGILQSLKIVDELVKIMG-HQPENIVVEMARENQ FTNQGRRNS | 777 |
| WP_019803776 | 704 | SFKEEIAKAQVIG-ETDN-LNQVVSDIAGSPAIKKGILQSLKIVDELVKIMG-HQPENIVVEMARENQ FTNQGRRNS | 777 |
| WP_019805234 | 704 | SFKEEIAKAQVIG-ETDN-LNQVVSDIAGSLAIKKGILQNLKIVDELVKIMG-HQPENIVVEMARENQ FTNQGRRNS | 777 |
| WP_024783594 | 704 | SFKEEIAKAQVIG-ETDN-LNQVVSDIAGSPAIKKGILQSLKIVDELVKIMG-HQPENIVVEMARENQ FTNQGRRNS | 777 |
| WP_024784288 | 705 | TFKDDIVKAQYVD-NSDD-LHQVVQSLAGSPAIKKGILQSLKIVDELVKVMG-KEPEQIVVEMARENQ TTAKGRRNS | 778 |
| WP_024784666 | 704 | SFKEEIAKAQVIG-ETDN-LNQVVSDIAGSPAIKKGILQSLKIVDELVKIMG-HQPENIVVEMARENQ FTNQGRRNS | 777 |
| WP_024784894 | 704 | SFKEEIAKAQVIG-ETDN-LNQVVSDIAGSPAIKKGILQSLKIVDELVKIMG-HQPENIVVEMARENQ FTNQGRRNS | 777 |
| WP_024786433 | 705 | TFKDDIVKAQYVD-NSDD-LHQVVQSLAGSPAIKKGILQSLKIVDELVKVMG-KEPEQIVVEMARENQ TTAKGRRNS | 778 |
| WP_049473442 | 704 | SFKEEIAKAQVIG-ETDN-LNQVVSDIAGSPAIKKGILQSLKIVDELVKIMG-HQPENIVVEMARENQ FTNQGRRNS | 777 |
| WP_049474547 | 704 | SFKEEIAKAQVIG-ETDN-LNQVVSDIAGSPAIKKGILQSLKIVDELVKIMG-HQPENIVVEMARENQ FTNQGRRNS | 777 |
| EMC03581 | 697 | SFKEEIAKAQVIG-ETDN-LNQVVSDIAGSPAIKKGILQSLKIVDELVKIMG-HQPENIVVEMARENQ FTNQGRRNS | 770 |
| WP_000428612 | 705 | SFKEIIKKAQVVG-KTDD-VKQVVQELPGSPAIKKGILQSIKLVDELVKVMG-HEPESIVIEMARENQ TTARGKKNS | 778 |
| WP_000428613 | 703 | SFKEITQKAQVVG-KTDD-VKQVVQELPGSPAIKKGILQSIKIVDELVKVMG-HTPESIVIEMARENQ TTARGKKNS | 776 |
| WP_049523028 | 702 | SFKETIQKAQVVG-ETND-VKQVVQELPGSPAIKKGILQSIKIVDELVKVMG-HAPESVVIEMARENO TTNKGKSKS | 775 |
| WP_003107102 | 672 | DFASIIKEAQEKTIKSEK-LEETIANLAGSPAIKKGILQSVKIVDEVVKVMG-YEPSNIVIEMARENQ STORGINNS | 746 |
| WP_054279288 | 705 | SFKEEIKKAQEGG-LKDS-INDQIRDLAGSPAIKKGILQTINIVDEIVKIMG-KAPQHIVVEMARDVQ KTDIGVKQS | 778 |
| WP_049531101 | 703 | SFKEIIQESQVVG-KPDD-VKQIVQELPGSSAIKKGILQSIKLVDELVKVMG-HDPESIVIEMARENQ TTARGKKNS | 776 |
| WP_049538452 | 703 | SFKEIIQKAQVFG-KIND-VKQVVQELPGSPAIKKGILQSIKIVEELVKVMG-HEPESIVIEMARENQ TTTRGKKNS | 776 |
| WP_049549711 | 703 | SFKKIIQKSQVVG-ETDD-VKQVVRELPGSPAIKKGILQSIKIVDELVKVMD-HAPESIVIEMARENQ TTARGKKNS | 776 |
| WP_007896501 | 706 | DFEKLIDDAQKKAIKRES-LTEAVANLAGSPAIKKGILQSLKVVDEIVKVMG-HNPDNIVIEMSRENQ TTAQGLKNA | 780 |
| EFR44625 | 658 | DFEKLIDDAQKKAiKRES-LTEAVANLAGSPAIKKGILQSLKVVDEIVKVMG-HNPDNIVIEMSRENQ TTAQGLKNA | 732 |
| WP_002897477 | 702 | SFKEIIQKAQVVG-KTDD-VKQVVQELPGSPAIKKGILQSIKIVDELVKVMG-YALESIVIEMARENQ TTARGKKNS | 775 |
| WP_002906454 | 702 | SFKEIIQKAQVVG-KTDD-VKQVVQEIPGSPAIKKGILQSIKIVDELVKVMG-HNPESIVIEMARENQ TTAKGKKNS | 775 |
| WP_009729476 | 703 | SFKEIIQKAQVVG-KIND-VKQVVQELPGSPAIKKGILQSIKIVDELVKVMG-HAPESIVIEMARENQ TTARGKKNS | 776 |
| COR24647 | 706 | SFKDEIANSQVIG-DGDD-LHQVVQELAGSPAIKKGILQSLKIVDELVKVMG-YNPEQIVVEMARENQ TTARGRNNS | 779 |
| WP_000066813 | 705 | SFKEIIQKAQVFG-KTND-VKQVVQELPGSPAIKKGILQSIKIVDELVKVMG-HAPESIVIEMARENQ TTARGKKNS | 778 |
| WP_009754323 | 703 | SFKEIIQKAQVVG-KTDD-LTQVVRELSGSPAIKKGILQSIKIVDELVKIMG-YAPESIVIEMARENQ TTAKGKKNS | 776 |
| WP_044674937 | 702 | SFVDEIRLAQGSG-EAED-YRAEVONLAGSPAIKKGILQSLKIVDELIEVMG-YDPEHIVVEMARENQ FTNQGRRNS | 775 |
| WP_044676715 | 704 | SFVDEIRLAQGSG-EAED-YRAEVONLAGSPAIKKGILQSLKIVDELIEVMG-YDPEHIVVEMARENQ FTNQGRRNS | 777 |
| WP_044680361 | 704 | SFVDEIRLAQGSG-EAED-YRAEVONLAGSPAIKKGILQSLKIVDELIEVMG-YDPEHIVVEMARENQ FTNQGRRNS | 777 |
| WP_044681799 | 702 | SFVDEIRLAQGSG-EAED-YRAEVONLAGSPAIKKGILQSLKIVDELIEVMG-YDPEHIVVEMARENQ FTNQGRRNS | 775 |
| WP_049533112 | 704 | SFKEEIAKAQVIG-ETDD-LNQVVSDIAGSPAIKKGILQSLKIVDELVKVMG-YNPANIVIEMARENQ TTDKGRRNS | 777 |
| WP_029090905 | 683 | LFKKIIEEQFENEtALLN--KORIDELAASPANKKGIWQAIKIVKELEKVLQ-QPAENIFIEFARSDE ES----KRS | 752 |
| WP_006506696 | 706 | GYAQMIEEATSCPeDGKF-TYEEVERLAGSPALKRGIWQSLQIVEEITKVMK-CRPKYIYIEFERSEE -----KERT | 776 |
| AIT42264 | 703 | TFKEDIQKAQVSG-QGDS-LHEHIANLAGSPAIKKGILQTVKVVDELVKVMGrHKPENIVIEMARENQ TTOKGQKNS | 777 |
| WP_034440723 | 711 | SFKEKIRKAQDIN-QVND-IKEIVKDLPGSPAIKKGIYQSIRIVDEIIRKMK-DRPKNIVIEMARENQ TTQEGKNKS | 784 |
| AKQ21048 | 703 | TFKEDIQKAQVSG-QGDS-LHEHIANLAGSPAIKKGILQTVKVVDELVKVMGrHKPENIVIEMARENQ TTOKGQKNS | 777 |
| WP_004636532 | 707 | SFKKKIEDAQTIE-DTTH-IYDTVAELPGSPAIKKGIRQALKIVEEIIDIIG-YEPENIVVEMARESQ TTKKGKDLS | 780 |
| WP_002364836 | 715 | SFKNAIQKAQSSE-HEET-LSETVNELAGSPAIKKGIYQSLKIVDELVAIMG-YAPKRIVVEMARENQ TTSTGKRRS | 788 |
| WP_016631044 | 666 | SFKNAIQKAQSSE-HEET-LSETVNELAGSPAIKKGIYQSLKIVDELVAIMG-YAPKRIVVEMARENQ TTSTGKRRS | 739 |
| EMS75795 | 455 | SFKEELANELALA-GNOS-LLEVVEALLGSPAIKKGIWOTLKIVEELIEIIG-YNPKNIVVEMARENQ RT----NRS | 524 |
| WP_002373311 | 715 | SFKNAIQKAQSSE-HEET-LSETVNELAGSPAIKKGIYQSLKIVDELVAIMG-YAPKRIVVEMARENQ TTSTGKRRS | 788 |
| WP_002378009 | 715 | SFKNAIQKAQSSE-HEET-LSETVNELAGSPAIKKGIYQSLKIVDELVAIMG-YAPKRIVVEMARENQ TTSTGKRRS | 788 |
| WP_002407324 | 715 | SFKNAIQKAQSSE-HEET-LSETVNELAGSPAIKKGIYQSLKIVDELVAIMG-YAPKRIVVEMARENQ TTSTGKRRS | 788 |
| WP_002413717 | 715 | SFKNAIQKAQSSE-HEET-LSETVNELAGSPAIKKGIYQSLKIVDELVAIMG-YAPKRIVVEMARENQ TTSTGKRRS | 788 |
| WP_010775580 | 717 | SFKNAIQKAQSSE-HEET-LSETVNELAGSPAIKKGIYQSLKIVDELVAIMG-YAPKRIVVEMARENQ TTSTGKRRS | 790 |
| WP_010818269 | 715 | SFKNAIQKAQSSE-HEET-LSETVNELAGSPAIKKGIYQSLKIVDELVAIMG-YAPKRIVVEMARENQ TTSTGKRRS | 788 |
| WP_010824395 | 715 | SFKNAIQKAQSSE-HEET-LSETVNELAGSPAIKKGIYQSLKIVDELVAIMG-YAPKRIVVEMARENQ TTSTGKRRS | 788 |
| WP_016622645 | 715 | SFKNAIQKAQSSE-HEET-LSETVNELAGSPAIKKGIYQSLKIVDELVAIMG-YAPKRIVVEMARENQ TTSTGKRRS | 788 |
| WP_033624816 | 715 | SFKNAIQKAQSSE-HEET-LSETVNELAGSPAIKKGIYQSLKIVDELVAIMG-YAPKRIVVEMARENQ TTSTGKRRS | 788 |
| WP_033625576 | 715 | SFKNAIQKAQSSE-HEET-LSETVNELAGSPAIKKGIYQSLKIVDELVAIMG-YAPKRIVVEMARENQ TTSTGKRRS | 788 |
| WP_033789179 | 715 | SFKNAIQKAQSSE-HEET-LSETVNELAGSPAIKKGIYQSLKIVDELVAIMG-YAPKRIVVEMARENQ TTSTGKRRS | 788 |
| WP_002310644 | 715 | SFKKEIKKAQMIT-DTEN-LEEIVKELTGSPAIKKGILQSLKIVDEIVGIMG-YEPANIVVEMARENQ TTGRGLKSS | 788 |
| WP_002312694 | 716 | SFKKEIKKAQMIT-DTEN-LEEIVKELTGSPAIKKGILQSLKIVDEIVGIMG-YEPANIVVEMARENQ TTGRGLKSS | 789 |
| WP_002314015 | 716 | SFKKEIKKAQMIT-DTEN-LEEIVKELTGSPAIKKGILQSLKIVDEIVGIMG-YEPANIVVEMARENQ TTGRGLKSS | 789 |
| WP_002320716 | 716 | SFKKEIKKAQMIT-DTEN-LEEIVKELTGSPAIKKGILQSLKIVDEIVGIMG-YEPANIVVEMARENQ TTGRGLKSS | 789 |
| WP_002330729 | 715 | SFKKEIKKAQMIT-DTEN-LEEIVKELTGSPAIKKGILQSLKIVDEIVGIMG-YEPANIVVEMARENQ TTGRGLKSS | 788 |
| WP_002335161 | 716 | SFKKEIKKAQMIT-DTEN-LEEIVKELTGSPAIKKGILQSLKIVDEIVGIMG-YEPANIVVEMARENQ TTGRGLKSS | 789 |
| WP_002345439 | 716 | SFKKEIKKAQMIT-DTEN-LEEIVKELTGSPAIKKGILQSLKIVDEIVGIMG-YEPANIVVEMARENQ TTGRGLKSS | 789 |
| WP_034867970 | 711 | SFKEEIAKATVFS-KHKS-LVDVIQDLPGSPAIKKGIWQSLKIVEELIAIIG-YKPKNIVIEMARENQ KT----HRT | 780 |
| WP_047937432 | 716 | SFKKEIKKAQMIT-DTEN-LEEIVKELTGSPAIKKGILQSLKIVDEIVGIMG-YEPANIVVEMARENQ TTGRGLKSS | 789 |
| WP_010720994 | 711 | SFKEEIAKATVFS-KHKS-LVDVIQDLPGSPAIKKGIWQSLKIVEELIAIIG-YKPKNIVIEMARENQ KT----HRT | 780 |
| WP_010737004 | 711 | SFKEEIAKATVFS-KHKS-LVDVIQDLPGSPAIKKGIWQSLKIVEELIAIIG-YKPKNIVIEMARENQ KT----HRT | 780 |
| WP_034700478 | 711 | SFKEEIAKATVFS-KHKS-LVDVIQDLPGSPAIKKGIWQSLKIVEELIAIIG-YKPKNIVIEMARENQ KT----HRT | 780 |
| WP_007209003 | 708 | SFKKIIEDSQPYK-EQQS-AEEIVSELSGSPAIKKGILQSLKIVDELVAIMG-YKPKNIVVEMARENQ TTGRGKONS | 781 |
| WP_023519017 | 705 | SFKETIANELIMS-DSNV-LLDQVKAIPGSPAVKKGIWQSIKIVEEIIGIIG-KAPKNIVIEMARENQ RTSR----S | 774 |
| WP_010770040 | 708 | SFKSEIAEAQSDM-NTED-LHEVVONLAGSPAIKKGILQSLKIVDELVDIMG-SLPKNIVVEMARENQ TTSRGRINS | 781 |
| WP_048604708 | 704 | TFKEEIEKEQLKA-NSEESLIEIVONLAGSPAIKKGIFQSLKIVDELVEIMG-YAPTNIVVEMARENQ TTANGRRNS | 778 |
| WP_010750235 | 710 | SFKEEIAKELTLS-DKQS-LLEVVEAIPGSPAIKKGIWQTLKIVEELIAIIG-YKPKNIVIEMARENQ TTTGGKNRS | 783 |
| AII16583 | 742 | TFKEDIQKAQVSG-QGDS-LHEHIANLAGSPAIKKGILQTVKVVDELVKVMGrHKPENIVIEMARENQ TTOKGOKNS | 816 |
| WP_029073316 | 718 | GFKKTIDDANSTSVSGKF-SYAEVQELAGSPAIKRGIWQALLIVDEIKKIMK-HEPAHVYIEFARNED -----KERK | 788 |
| WP_031589969 | 718 | GFKKTIDDANSTSVSGKF-SYAEVQELAGSPAIKRGIWQALLIVDEIKKIMK-HEPAHVYIEFARNED -----KERK | 788 |
| KDA45870 | 699 | SFKETIKNAQVIE-KEET-LAKTVQELPGSPAIKKGILQSLEIVDEIIKVMG-YKPKSIVVEMARETQ --THGTRKR | 771 |
| WP_039099354 | 713 | DFDKLITEANQMM-LAENdVQDVINDLYTSPONKKALRQILLVVNDIQKAMKgQAPERILIEFAREDE VNPRLSVQR | 788 |
| AKP02966 | 707 | DFKNYIENHNLNKNEDQN-ISNLVNDIHVSPALKRGITQSIKIVQEIVKFMG-HAPKYIFIEVTRETK TTSRGKRIQ | 785 |
| WP_010991369 | 707 | SFKSIIEKEQVTT-ADKD-IQSIVADLAGSPAIKKGILQSLKIVDELVSVMG-YPPQTIVVEMARENQ TTGKGKNNS | 780 |
| WP_033838504 | 707 | SFKSIIEKEQVTT-ADKD-IQSIVADLAGSPAIKKGILQSLKIVDELVSVMG-YPPQTIVVEMARENQ TTGKGKNNS | 780 |
| EHN60060 | 710 | SFKSIIEKEQVTT-ADKD-IQSIVADLAGSPAIKKGILQSLKIVDELVSVMG-YPPQTIVVEMARENQ TTGKGKNNS | 783 |
| EFR89594 | 476 | SFKSIIEKEQVTT-ADKD-IQSIVADLAGSPAIKKGILQSLKIVDELVSVMG-YPPQTIVVEMARENQ TTGKGKNNS | 549 |
| WP_038409211 | 707 | SFKSIIEKEQVST-ADKG-IQSIVAELAGSPAIKKGILQSLKIVDELVGIMG-YPPQTIVVEMARENQ TTGKGKNNS | 780 |
| EFR95520 | 326 | SFKSIIEKEQVST-ADKG-IQSIVAELAGSPAIKKGILQSLKIVDELVGIMG-YPPQTIVVEMARENQ TTGKGKNNS | 399 |
| WP_003723650 | 707 | SFKSIIEKEQVST-TDKD-LQSIVAELAGSPAIKKGILQSLKIVDELVSIMG-YPPQTIVVEMARENQ TTGKGKNNS | 780 |
| WP_003727705 | 707 | SFKSIIEKEQVST-TDKD-LQSIVADLAGSPAIKKGILQSLKIVDELVSIMG-YPPQTIVVEMARENQ TTGKGKNNS | 780 |
| WP_003730785 | 707 | SFKSIIEKEQVST-TDKD-LOSIVADLAGSPAIKKGILQSLKIVDELVSIMG-YPPQTIVVEMARENQ TTGKGKNNS | 780 |
| WP_003733029 | 707 | SFKSIIEKEQVST-TDKD-LOSIVAELAGSPAIKKGILQSLKIVDELVSVMG-YPPQTIVVEMARENQ TTNKGKNNS | 780 |
| WP_003739838 | 707 | SFKSIIEKEQVST-TDKD-LQSIVADLAGSPAIKKGILQSLKIVDELVSIMG-YPPQTIVVEMARENQ TTVKGKNNS | 780 |
| WP_014601172 | 707 | SFKSIIEKEQVST-TDKD-LOSIVADLAGSPAIKKGILQSLKIVDELVSIMG-YPPQTIVVEMARENQ TTGKGKNNS | 780 |
| WP_023548323 | 707 | SFKSIIEKEQVST-ADKD-LOSIVADLAGSPAIKKGILQSLKVVEELVSVMG-YPPQTIVVEMARENQ TTNKGKNNS | 780 |
| WP_031665337 | 707 | SFKSIIEKEQVST-TDKD-LQSIVAELAGSPAIKKGILQSLKIVDELVSIMG-YPPQTIVVEMARENQ TTGKGKNNS | 780 |
| WP_031669209 | 707 | SFKSIIEKEQVST-ADKD-LOSIVADLAGSPAIKKGILQSLKIVDELVSVMG-YPPQTIVVEMARENQ TTNKGKNNS | 780 |
| WP_033920898 | 707 | SFKSIIEKEQVST-ADKD-LQSIVADLAGSPAIKKGILQSLKVVEELVSVMG-YPPQTIVVEMARENQ TTNKGKNNS | 780 |
| AKI42028 | 710 | SFKSIIEKEQVST-TDKD-LOSIVADLAGSPAIKKGILQSLKIVDELVSIMG-YPPQTIVVEMARENQ TTGKGKNNS | 783 |
| AKI50529 | 710 | SFKSIIEKEQVST-ADKD-LOSIVADLAGSPAIKKGILQSLKVVEELVSVMG-YPPQTIVVEMARENQ TTNKGKNNS | 783 |
| EFR83390 | 155 | SFKSIIEKEQVST-TDKD-LOSIVADLAGSPAIKKGILQSLKIVDELVSIMG-YPPQTIVVEMARENQ TTVKGKNNS | 228 |
| WP_046323366 | 707 | SFKSIIEKEQVST-ADKD-IQSIVADLAGSPAIKKGILQSLKIVDELVGIMG-YPPQTIVVEMARENQ TTGKGKNNS | 780 |
| AKE81011 | 719 | TFKEDIQKAQVSG-QGDS-LHEHIANLAGSPAIKKGILQTVKVVDELVKVMGrHKPENIVIEMARENQ TTOKGQKNS | 793 |
| CUO82355 | 710 | GYAQMIEEASSCPKDGKF-TYEEVAKLAGSPALKRGIWQSLQIVEEITKVMK-CRPKYIYIEFERSEE -----KERT | 780 |
| WP_033162887 | 713 | GYKQIIEESNMQDIEGPF-KYDEVKKLAGSPAIKRGIWQALLVVREITKFMK-HEPSHIYIEFAREEQ -----KVRK | 783 |
| AGZ01981 | 736 | TFKEDIQKAQVSG-QGDS-LHEHIANLAGSPAIKKGILQTVKVVDELVKVMGrHKPENIVIEMARENQ TTQKGQKNS | 810 |
| AKA60242 | 703 | TFKEDIQKAQVSG-QGDS-LHEHIANLAGSPAIKKGILQTVKVVDELVKVMGrHKPENIVIEMARENQ TTOKGQKNS | 777 |
| AKS40380 | 703 | TFKEDIQKAQVSG-QGDS-LHEHIANLAGSPAIKKGILQTVKVVDELVKVMGrHKPENIVIEMARENQ TTQKGQKNS | 777 |
| 4UN5_B | 707 | TFKEDIQKAQVSG-QGDS-LHEHIANLAGSPAIKKGILQTVKVVDELVKVMGrHKPENIVIEMARENQ TTQKGQKNS | 781 |
| WP_010922251 | 778 | [chemical structure] | 841 |
| WP_039695303 | 781 | QQRLKKLONSLK PSYI E----DK--VE---NSHLONDQLFLYYIQNGKDMYTGDEL--D--IDHLSDYDIDHI | 851 |
| WP_045635197 | 776 | QQRYKRIEDSLK ILAS NILKENP--TD---NNQLQNDRLFLYYLONGKDMYTGEAL--D--INQLSSYDIDHI | 843 |
| 5AXW_A | 488 | KDAQKMINEMQK QTNE EIIRTTGk--E---NAKYLIEKIKLHDMQEGKCLYSLEAIplEd1LNNPFNYEVDHI | 561 |
| WP_009880683 | 462 | RERMKRIEEGIK ELGS DILKEYP--VE---NTQLQNEKLYLYYLONGRDMYVDQEL--D--INRLSDYDVDHI | 525 |
| WP_010922251 | 778 | RERMKRIEEGIK ELGS QILKEHP--VE---NTQLQNEKLYLYYLQNGRDMYVDQEL--D--INRLSDYDVDHI | 841 |
| WP_011054416 | 778 | RERMKRIEEGIK ELGS DILKEYP--VE---NTQLQNEKLYLYYLONGRDMYVDQEL--D--INRLSDYDVDHI | 841 |
| WP_011284745 | 778 | RERMKRIEEGIK ELGS QILKEHP--VE---NTQLQNEKLYLYYLONGRDMYVDQEL--D--INRLSDYDVDHI | 841 |
| WP_011285506 | 778 | RERMKRIEEGIK ELGS QILKEHP--VE---NTQLQNEKLYLYYLONGRDMYVDQEL--D--INRLSDYDVDHI | 841 |
| WP_011527619 | 778 | RERMKRIEEGIK ELGS QILKEHP--VE---NTQLQNEKLYLYYLONGRDMYVDQEL--D--INRLSDYDVDHI | 841 |
| WP_012560673 | 778 | RERMKRIEEGIK ELGS DILKEYP--VE---TTQLQNEKLYLYYLONGRDMYVDQEL--D--INRLSDYDVDHI | 841 |
| WP_014407541 | 777 | RERMKRIEEGIK ELGS QILKEHP--VE---NTQLQNEKLYLYYLONGRDMYVDQEL--D--INRLSDYDVDHI | 840 |
| WP_020905136 | 778 | RERMKRIEEGIK ELGS QILKEHP--VE---NTQLQNEKLYLYYLONGRDMYVDQEL--D--INRLSDYDVDHI | 841 |
| WP_023080005 | 777 | RERMKRIEEGIK ELGS QILKEHP--VE---NTQLQNEKLYLYYLONGRDMYVDQEL--D--INRLSDYDVDHI | 840 |
| WP_023610282 | 777 | RERMKRIEEGIK ELGS QILKEHP--VE---NTQLQNEKLYLYYLQNGRDMYVDQEL--D--INRLSDYDVDHI | 840 |
| WP_030125963 | 778 | RERMKRIEEGIK ELGS DILKEYP--VE---NTQLQNEKLYLYYLONGRDMYVDQEL--D--INRLSDYDVDHI | 841 |
| WP_030126706 | 778 | RERMKRIEEGIK ELGS DILKEYP--VE---NTQLQNEKLYLYYLONGRDMYVDQEL--D--INRLSDYDVDHI | 841 |
| WP_031488318 | 778 | RERMKRIEEGIK ELGS DILKEYP--VE---NTQLQNEKLYLYYLONGRDMYVDQEL--D--INRLSDYDVDHI | 841 |
| WP_032460140 | 778 | RERMKRIEEGIK ELGS DILKEYP--VE---NTQLQNEKLYLYYLQNGRDMYVDQEL--D--INRLSDYDVDHI | 841 |
| WP_032461047 | 778 | RERMKRIEEGIK ELGS DILKEYP--VE---NTQLQNEKLYLYYLONGRDMYVDQEL--D--INRLSDYDVDHI | 841 |
| WP_032462016 | 778 | RERMKRIEEGIK ELGS QILKEHP--VE---NTQLQNEKLYLYYLONGRDMYVDQEL--D--INRLSDYDVDHI | 841 |
| WP_032462936 | 778 | RERMKRIEEGIK ELGS DILKEYP--VE---NTQLQNEKLYLYYLQNGRDMYVDQEL--D--INRLSDYDVDHI | 841 |
| WP_032464890 | 778 | RERMKRIEEGIK ELGS QILKEHP--VE---NTQLQNEKLYLYYLONGRDMYVDQEL--D--INRLSDYDVDHI | 841 |
| WP_033888930 | 603 | RERMKRIEEGIK ELGS QILKEHP--VE---NTQLQNEKLYLYYLONGRDMYVDQEL--D--INRLSDYDVDHI | 666 |
| WP_038431314 | 778 | RERMKRIEEGIK ELGS DILKEYP--VE---NTQLQNEKLYLYYLONGRDMYVDQEL--D--INRLSDYDVDHI | 841 |
| WP_038432938 | 777 | RERMKRIEEGIK ELGS QILKEHP--VE---NTQLQNEKLYLYYLONGRDMYVDQEL--D--INRLSDYDVDHI | 840 |
| WP_038434062 | 778 | RERMKRIEEGIK ELGS DILKEYP--VE---NTQLQNEKLYLYYLONGRDMYVDQEL--D--INRLSDYDVDHI | 841 |
| BAQ51233 | 689 | RERMKRIEEGIK ELGS QILKEHP--VE---NTQLQNEKLYLYYLONGRDMYVDQEL--D--INRLSDYDVDHI | 752 |
| KGE60162 | 1 | ------------ ---- -------------------------------------QEL--D--INRLSGYDVDHI | 16 |
| KGE60856 | | ------------ ---- --------------------------------------------------------- | |
| WP_002989955 | 778 | RERMKRIEEGIK ELGS QILKEHP--VE---NTQLQNEKLYLYYLONGRDMYVDQEL--D--INRLSDYDVDHI | 841 |
| WP_003030002 | 778 | QQRLKLLQDSLK PVNI K-----N--VE---NQQLQNDRLFLYYIQNGKDMYTGETL--D--INNLSQYDIDHI | 840 |
| WP_003065552 | 781 | QQRLKKLONSLK PSYI E----DK--VE---NSHLONDQLFLYYIQNGKDMYTGDEL--D--IDHLSDYDIDHI | 851 |
| WP_001040076 | 776 | RQRLTTLRESLA NLKS EKKPKYV--KDqveNHHLSDDRLFLYYLONGKDMYTDDEL--D--IDNLSQYDIDHI | 846 |
| WP_001040078 | 779 | RQRYKLLDDGVK NLAS NILKEYP--TD---NQALQNERLFLYYLONGRDMYTGEAL--D--IDNLSQYDIDHI | 846 |
| WP_001040080 | 779 | RQRYKLLDDGVK NLAS NILKEYP--TD---NQALQNERLFLYYLQNGRDMYTGEAL--D--IDNLSQYDIDHI | 846 |
| WP_001040081 | 779 | RQRYKLLDDGVK NLAS NILKEYP--TD---NQALQNERLFLYYLONGRDMYTGEAL--D--IDNLSQYDIDHI | 846 |
| WP_001040083 | 779 | RQRYKLLDDGVK NLAS NILKEYP--TD---NQALQNERLFLYYLONGRDMYTGEAL--D--IDNLSQYDIDHI | 846 |
| WP_001040085 | 779 | RQRYKLLDDGVK NLAS NILKEYP--TD---NQALONERLFLYYLONGRDMYTGEAL--D--IDDLSQYDIDHI | 846 |
| WP_001040087 | 779 | RQRYKLLDDGVK NLAS NILKEYP--TD---NQALQNERLFLYYLONGRDMYTGEAL--D--IDNLSQYDIDHI | 846 |
| WP_001040088 | 779 | RQRYKLLDDGVK NLAS NILKEYP--TD---NQALQNERLFLYYLONGRDMYTGEAL--D--IDNLSQYDIDHI | 846 |
| WP_001040089 | 779 | RQRYKLLDDGVK NLAS NILKEYP--TD---NQALQNERLFLYYLONGRDMYTGEAL--D--IDNLSQYDIDHI | 846 |
| WP_001040090 | 779 | RQRYKLLDDGVK NLAS NILKEYP--TD---NQALQNERLFLYYLONGRDMYTGEAL--D--IDNLSQYDIDHI | 846 |
| WP_001040091 | 779 | RQRYKLLDDGVK NLAS NILKEYP--TD---NQALQNERLFLYYLONGRDMYTGEAL--D--IDNLSQYDIDHI | 846 |
| WP_001040092 | 779 | RQRYKLLEDGVK NLAS DILKEYP--TD---NQALONERLFLYYLONGRDMYTGEAL--D--IDNLSQYDIDHI | 846 |
| WP_001040094 | 776 | RQRLTTLRESLA NLKS EKKPKYV--KDqveNHHLSDDRLFLYYLONGKDMYTDDEL--D--IDNLSQYDIDHI | 846 |
| WP_001040095 | 776 | RQRLTTLRESLA NLKS EKKPKYV--KDqveNHHLSDDRLFLYYLONGKDMYTDDEL--D--IDNLSQYDIDHI | 846 |
| WP_001040096 | 776 | RORLTTLRESLA NLKS EKKPKYV--KDqveNHHLSDDRLFLYYLONGKDMYTDDEL--D--IDNLSQYDIDHI | 846 |
| WP_001040097 | 776 | RORLTTLRESLA NLKS EKKPKYV--KDqveNHHLSDDRLFLYYLONGKDMYTDDEL--D--IDNLSQYDIDHI | 846 |
| WP_001040098 | 776 | RQRLTTLRESLA NLKS EKKPKYV--KDqveNHHLSDDRLFLYYLONGKDMYTDDEL--D--IDNLSQYDIDHI | 846 |
| WP_001040099 | 776 | RORLTTLRESLA NLKS EKKPKYV--KDqveNHHLSDDRLFLYYLONGKDMYTDDEL--D--IDNLSQYDIDHI | 846 |
| WP_001040100 | 776 | RORLTTLRESLA NLKS EKKPKYV--KDqveNHHLSDDRLFLYYLONGKDMYTDDEL--D--IDNLSQYDIDHI | 846 |
| WP_001040104 | 779 | RQRYKLLDDGVK NLAS NILKEYP--TD---NQALONERLFLYYLONGRDMYTGEAL--D--IDNLSQYDIDHI | 846 |
| WP_001040105 | 779 | RQRYKLLDDGVK NLAS NILKEYP--TD---NQALQNERLFLYYLONGRDMYTGEAL--D--IDNLSQYDIDHI | 846 |
| WP_001040106 | 779 | RORYKLLEEGVK NLAS NILKEYP--TD---NQALQNERLFLYYLONGRDMYTGEAL--D--IDNLSQYDIDHI | 846 |
| WP_001040107 | 779 | RQRYKLLEEGVK NLAS NILKEYP--TD---NQALQNERLFLYYLONGRDMYTGEAL--D--IDNLSQYDIDHI | 846 |
| WP_001040108 | 779 | RORYKLLEEGVK NLAS NILKEYP--TD---NQALQNERLFLYYLONGRDMYTGETL--D--IDNLSQYDIDHI | 846 |
| WP_001040109 | 779 | RORYKLLEEGVK NLAS NILKEYP--TD---NQALQNERLFLYYLONGRDMYTGEAL--D--IDNLSQYDIDHI | 846 |
| WP_001040110 | 779 | RORYKLLEEGVK NLAS NILKEYP--TD---NQALQNERLFLYYLONGRDMYTGEAL--D--IDNLSQYDIDHI | 846 |
| WP_015058523 | 779 | RQRYKLLEDGVK NLAS DILKEYP--TD---NQALQNERLFLYYLONGRDMYTGEAL--D--IDNLSQYDIDHI | 846 |
| WP_017643650 | 776 | RQRLTTLRESLA NLKS EKKPKYV--KDqveNHHLSDDRLFLYYLONGKDMYTDDEL--D--IDNLSQYDIDLI | 846 |
| WP_017647151 | 779 | RQRYKLLDDGVK NLAS NILKEYP--TD---NQALONERLFLYYLONGRDMYTGKAL--D--IDNLSQYDIDHI | 846 |
| WP_017648376 | 779 | RQRYKLLDDGVK NLAS NILKEYP--TD---NQALQNERLFLYYLQNGRDMYTGKAL--D--IDNLSQYDIDHI | 846 |
| WP_017649527 | 779 | RORYKLLDDGVK NLAS NILKEYP--TD---NQALONERLFLYYLQNGRDMYTGEAL--D--IDNLSQYDIDHI | 846 |
| WP_017771611 | 779 | RORYKLLEEGVK NLAS NILKEYP--TD---NQALONERLFLYYLONGRDMYTGEAL--D--IDNLSQYDIDHI | 846 |
| WP_017771984 | 779 | RQRYKLLDDGVK NLAS NILKEYP--TD---NQALQNERLFLYYLONGRDMYTGEAL--D--IDNLSQYDIDHI | 846 |
| CFQ25032 | 779 | RQRYKLLDDGVK NLAS NILKEYP--TD---NQALQNERLFLYYLONGRDMYTGEAL--D--IDNLSQYDIDHI | 846 |
| CFV16040 | 779 | RQRYKLLDDGVK NLAS NILKEYP--TD---NQALQNERLFLYYLONGRDMYTGEAL--D--IDNLSQYDIDHI | 846 |
| KLJ37842 | 779 | RORYKLLDDGVK NLAS NILKEYP--TD---NQALQNERLFLYYLONGRDMYTGEAL--D--IDNLSQYDIDHI | 846 |
| KLJ72361 | 779 | RQRYKLLDDGVK NLAS NILKEYP--TD---NQALQNERLFLYYLONGRDMYTGEAL--D--IDNLSQYDIDHI | 846 |
| KLL20707 | 793 | RORYKLLDDGVK NLAS NILKEYP--TD---NQALQNERLFLYYLONGRDMYTGEAL--D--IDNLSQYDIDHI | 860 |
| KLL42645 | 779 | RORYKLLEEGVK NLAS NILKEYP--TD---NQALONERLFLYYLONGRDMYTGEAL--D--IDNLSQYDIDHI | 846 |
| WP_047207273 | 779 | RQRYKLLDDGVK NLAS NILKEYP--TD---NQALQNERLFLYYLONGRDMYTGEAL--D--IDNLSQYDIDHI | 846 |
| WP_047209694 | 776 | RQRLTTLRESLA NLKS EKKPKYV--KDqveNHHLSDDRLFLYYLQNGKDMYTDDEL--D--IDNLSQYDIDHI | 846 |
| WP_050198062 | 779 | RQRYKLLDDGVK NLAS NILKEYP--TD---NQALQNERLFLYYLONGRDMYTGEAL--D--IDNLSQYDIDHI | 846 |
| WP_050201642 | 779 | RQRYKLLDDGVK NLAS NILKEYP--TD---NQALQNERLFLYYLONGRDMYTGEAL--D--IDNLSQYDIDHI | 846 |
| WP_050204027 | 779 | RQRYKLLEEGVK NLAS NILKEYP--TD---NQALQNERLFLYYLONGRDMYTGEAL--D--IDNLSQYDIDHI | 846 |
| WP_050881965 | 779 | RORYKLLDDGVK NLAS NILKEYP--TD---NQALQNERLFLYYLONGRDMYTGEAL--D--IDNLSQYDIDHI | 846 |
| WP_050886065 | 779 | RORYKLLDDGVK NLAS NILKEYP--TD---NQALQNERLFLYYLONGRDMYTGEAL--D--IDNLSQYDIDHI | 846 |
| AHN30376 | 779 | RQRYKLLEDGVK NLAS DILKEYP--TD---NQALQNERLFLYYLONGRDMYTGEAL--D--IDSLSQYDIDHI | 846 |
| EAO78426 | 779 | RQRYKLLDDGVK NLAS NILKEYP--TD---NQALQNERLFLYYLONGRDMYTGEAL--D--IDNLSQYDIDHI | 846 |
| CCW42055 | 779 | RQRYKLLDDGVR NLAS NILKEYP--TD---NQALQNERLFLYYLONGRDMYTEKAL--D--IDNLSQYDIDHI | 846 |
| WP_003041502 | 778 | QQRLKLLQDSLK PVNI K-----N--VE---NQQLQNDRLFLYYIQNGKDMYTGETL--D--INNLSQYDIDHI | 840 |
| WP_037593752 | 779 | QQRLKLLQDSLK PVNI K-----N--VE---NQQLQNDRLFLYYIQNGKDMYTGETL--D--INNLSQYDIDHI | 841 |
| WP_049516684 | 779 | QQRLKLLQDSLK PVNI K-----N--VE---NQQLQNDRLFLYYIQNGKDMYTGETL--D--INNLSQYDIDHI | 841 |
| GAD46167 | 778 | QQRLKLLQDSLK PVNI K-----N--VE---NQQLQNDRLFLYYIQNGKDMYTGETL--D--INNLSQYDIDHI | 840 |
| WP_018363470 | 779 | QQRLKKLQNSLK PSYI E----DK--VE---NSHLONDQLFLYYIQNGKDMYTGDEL--D--IDHLSDYDIDHI | 849 |
| WP_003043819 | 787 | RERKKRIEEGIK ELES QILKENP--VE---NTQLQNEKLYLYYLONGRDMYVDQEL--D--INRLSDYDVDHI | 850 |
| WP_006269658 | 778 | QQRLKLLQDSLK PVNI K-----N--VE---NQQLQNDRLFLYYIQNGKDMYTGETL--D--INNLSQYDIDHI | 840 |
| WP_048800889 | 778 | QQRLKLLQDSLT PVSI K-----N--VE---NQQLQNDRLFLYYIQNGKDMYTGEEL--D--IHHLSDYDIDHI | 840 |
| WP_012767106 | 777 | RERMKRIEEGIK ELGS QILKEHP--VE---NTQLQNEKLYLYYLONGRDMYVDQEL--D--INRLSDYDVDHI | 840 |
| WP_014612333 | 777 | RERMKRIEEGIK ELGS QILKEHP--VE---NTQLQNEKLYLYYLONGRDMYVDQEL--D--INRLSDYDVDHI | 840 |
| WP_015017095 | 777 | RERMKRIEEGIK ELGS QILKEHP--VE---NTQLQNEKLYLYYLONGRDMYVDQEL--D--INRLSDYDVDHI | 840 |
| WP_015057649 | 777 | RERMKRIEEGIK ELGS QILKEHP--VE---NTQLQNEKLYLYYLONGRDMYVDQEL--D--INRLSDYDVDHI | 840 |
| WP_048327215 | 777 | RERMKRIEEGIK ELGS QILKEHP--VE---NTQLQNEKLYLYYLONGRDMYVDQEL--D--INRLSDYDVDHI | 840 |
| WP_049519324 | 777 | RERMKRIEEGIK ELGS QILKEHP--VE---NTQLQNEKLYLYYLONGRDMYVDQEL--D--INRLSDYDVDHI | 840 |
| WP_012515931 | 777 | RORMRKLEETAK KLGS NILKEHP--VD---NSQLQNDKRYLYYLONGKDMYTGDDL--D--IDYLSSYDIDHI | 840 |
| WP_021320964 | 777 | RORMRKLEETAK KLGS NILKEHP--VD---NSQLQNDKRYLYYLONGKDMYTGDDL--D--IDYLSSYDIDHI | 840 |
| WP_037581760 | 777 | RQRMRKLEETAK KLGS NILKEHP--VD---NSQLQNDKRYLYYLONGKDMYTGDDL--D--IDYLSSYDIDHI | 840 |
| WP_004232481 | 778 | NORLKRLQDSLK PSYV D----SK--VE---NSHLONDRLFLYYIQNGKDMYTGEEL--D--IDHLSDYDIDHI | 848 |
| WP_009854540 | 779 | QQRLKKLQSSLK PSYI E----DK--VE---NSHLONDQLFLYYIQNGKDMYTGDEL--D--IDHLSDYDIDHI | 849 |
| WP_012962174 | 779 | QQRLKKLQDSLK PSYI E----GK--VE---NNHLQDDRLFLYYIQNGKDMYTGDEL--D--IDHLSDYDIDHI | 849 |
| WP_039695303 | 781 | QQRLKKLQNSLK PSYI E----DK--VE---NSHLQNDQLFLYYIQNGKDMYTGDEL--D--IDHLSDYDIDHI | 851 |
| WP_014334983 | 778 | NQRLKRLQDSLK PSYV D----SK--VE---NSHLQNDRLFLYYIQNGKDMYTGEEL--D--IDRLSDYDIDHI | 848 |
| WP_003099269 | 778 | RQRLRKLEEVHK NTGS KILKEYN--VS---NTQLQSDRLYLYLLQDGKDMYTGKEL--D--YDNLSQYDIDHI | 841 |
| AHY15608 | 778 | RQRLRKLEEVHK NTGS KILKEYN--VS---NTQLQSDRLYLYLLQDGKDMYTGKEL--D--YDNLSQYDIDHI | 841 |
| AHY17476 | 778 | RQRLRKLEEVHK NTGS KILKEYN--VS---NTQLQSDRLYLYLLQDGKDMYTGKEL--D--YDNLSQYDIDHI | 841 |
| ESR09100 | | ------------ ---- --------------------------------------------------------- | |
| AGM98575 | 778 | RORLRKLEEVHK NTGS KILKEYN--VS---NTQLQSDRLYLYLLQDGKDMYTGKEL--D--YDNLSQYDIDHI | 841 |
| ALF27331 | 778 | QQRLKGLTDSIK EFGS QILKEHP--VE---NSQLQNDRLFLYYLONGRDMYTGEEL--D--IDYLSQYDIDHI | 841 |
| WP_018372492 | 791 | AQRLKKIEDGIK -LGS DLLKONP--IQd--NKDLQKEKLFLYYMONGIDLYTGQPLncD--PDSLAFYDVDHI | 857 |
| WP_045618028 | 777 | QQRYKRIEDALK NLAH NILKEHP--TD---NIQLQNDRLFLYYLONGKDMYTGKSL--D--INQLSSCDIDHI | 844 |
| WP_045635197 | 776 | QQRYKRIEDSLK ILAS NILKENP--TD---NNQLQNDRLFLYYLONGKDMYTGEAL--D--INQLSSYDIDHI | 843 |
| WP_002263549 | 778 | QQRLKGLTDSIK EFGS QILKEHP--VE---NSQLQNDRLFLYYLONGRDMYTGEEL--D--IDYLSQYDIDHI | 841 |
| WP_002263887 | 778 | QQRLKGLTDSIK EFGS QILKEHP--VE---NSQLQNDRLFLYYLONGRDMYTGEEL--D--IDYLSQYDIDHI | 841 |
| WP_002264920 | 778 | QQRLKGLTDSIK EFGS QILKEHP--VE---NSQLQNDRLFLYYLONGRDMYTGEEL--D--IDYLSQYDIDHI | 841 |
| WP_002269043 | 778 | QQRLKGLTDSIK EFGS QILKEHP--VE---NSQLQNDRLFLYYLONGRDMYTGEEL--D--IDYLSQYDIDHI | 841 |
| WP_002269448 | 778 | QQRLKGLTDSIK EFGS QILKEHP--VE---NSQLQNDRLFLYYLONGRDMYTGEEL--D--IDYLSQYDIDHI | 841 |
| WP_002271977 | 778 | QQRLKGLTDSIK EFGS QILKEHP--VE---NSQLQNDRLFLYYLONGRDMYTGEEL--D--IDYLSQYDIDHI | 841 |
| WP_002272766 | 778 | QQRLKGLTDSIK EFGS QILKEHP--VE---NSQLQNDRLFLYYLONGRDMYTGEEL--D--IDYLSQYDIDHI | 841 |
| WP_002273241 | 778 | QQRLKGLTDSIK EFGS QILKEHP--VE---NSQLQNDRLFLYYLONGRDMYTGEEL--D--IDYLSQYDIDHI | 841 |
| WP_002275430 | 778 | QQRLKGLTDSIK EFGS QILKEHP--VE---NSQLQNDRLFLYYLONGRDMYTGEEL--D--IDYLSQYDIDHI | 841 |
| WP_002276448 | 778 | QQRLKGLTDSIK EFGS QILKEHP--VE---NSQLQNDRLFLYYLONGRDMYTGEEL--D--IDYLSQYDIDHI | 841 |
| WP_002277050 | 779 | QQRYKRLKEAIK DLNH KILKEHP--TD---NQALONNRLFLYYLONGRDMYTGESL--D--INRLSDYDIDHV | 846 |
| WP_002277364 | 778 | QQRLKGLTDSIK EFGS QILKEHP--VE---HSQLQNDRLFLYYLONGRDMYTGEEL--D--IDYLSQYDIDHI | 841 |
| WP_002279025 | 778 | QQRLKGLTDSIK EFGS QILKEHP--VE---NSQLQNDRLFLYYLONGRDMYTGEEL--D--IDYLSQYDIDHI | 841 |
| WP_002279859 | 778 | QQRLKGLTDSIK EFGS QILKEHP--VE---NSQLQNDRLFLYYLONGRDMYTGEEL--D--IDYLSQYDIDHI | 841 |
| WP_002280230 | 778 | QQRLKGLTDSIK EFGS QILKEHP--VE---NSQLQNDRLFLYYLONGRDMYTGEEL--D--IDYLSQYDIDHI | 841 |
| WP_002281696 | 778 | QQRLKGLTDSIK EFGS QILKEHP--VE---NSQLQNDRLFLYYLONGRDMYTGEEL--D--IDYLSQYDIDHI | 841 |
| WP_002282247 | 779 | QQRYKRLKEAIK DLNH KILKEHP--TD---NQALONNRLFLYYLONGRDMYTGESL--D--INRLSDYDIDHV | 846 |
| WP_002282906 | 778 | QQRLKGLTDSIK EFGS QILKEHP--VE---NSQLQNDRLFLYYLQNGRDMYTGEEL--D--IDYLSQYDIDHI | 841 |
| WP_002283846 | 778 | QQRLKGLTDSIK EFGS QILKEHP--VE---NSQLQNDRLFLYYLONGRDMYTGEEL--D--IDYLSQYDIDHI | 841 |
| WP_002287255 | 778 | QQRLKGLTDSIK EFGS QILKEHP--VE---HSQLQNDRLFLYYLONGRDMYTGEEL--D--IDYLSQYDIDHI | 841 |
| WP_002288990 | 778 | QQRLKGLTDSIK EFGS QILKEHP--VE---NSQLQNDRLFLYYLONGRDMYTGEEL--D--IDYLSQYDIDHI | 841 |
| WP_002289641 | 778 | QQRLKGLTDSIK EFGS QILKEHP--VE---NSQLONDRLFLYYLONGRDMYTGEEL--D--IDYLSQYDIDHI | 841 |
| WP_002290427 | 778 | QQRLKGLTDSIK EFGS QILKEHP--VE---NSQLONDRLFLYYLONGRDMYTGEEL--D--IDYLSQYDIDHI | 841 |
| WP_002295753 | 778 | QQRLKGLTDSIK EFGS QILKEHP--VE---NSQLQNDRLFLYYLONGRDMYTGEEL--D--IDYLSQYDIDHI | 841 |
| WP_002296423 | 778 | QQRLKGLTDSIK EFGS QILKEHP--VE---NSQLQNDRLFLYYLONGRDMYTGEEL--D--IDYLSQYDIDHI | 841 |
| WP_002304487 | 788 | QKRYKRLEEAIK DINH KILKEHP--TD---NQALQNDRLFLYYLONGRDMYTEDPL--D--INRLSDYDIDHI | 855 |
| WP_002305844 | 778 | QQRLKGLTDSIK EFGS QILKEHP--VE---NSQLQNDRLFLYYLONGRDMYTGEEL--D--IDYLSQYDIDHI | 841 |
| WP_002307203 | 778 | QQRLKGLTDSIK EFGS QILKEHP--VE---NSQLQNDRLFLYYLONGRDMYTGEEL--D--IDYLSQYDIDHI | 841 |
| WP_002310390 | 778 | QQRLKGLTDSIK EFGS QILKEHP--VE---NSQLQNDRLFLYYLONGRDMYTGEEL--D--IDYLSQYDIDHI | 841 |
| WP_002352408 | 778 | QQRLKGLTDSIK EFGS QILKEHP--VE---NSQLQNDRLFLYYLONGRDMYTGEEL--D--IDYLSQYDIDHI | 841 |
| WP_012997688 | 778 | QQRLKGLTDSIK EFGS QILKEHP--VK---HSQLQNDRLFLYYLONGRDMYTGEEL--D--IDYLSQYDIDHI | 841 |
| WP_014677909 | 778 | QQRLKGLTDSIK EFGS QILKEHP--VE---NSQLQNDRLFLYYLONGRDMYTGEEL--D--IDYLSQYDIDHI | 841 |
| WP_019312892 | 778 | QQRLKGLTDSIK EFGS QILKEHP--VE---NSQLQNDRLFLYYLONGRDMYTGEEL--D--IDYLSQYDIDHI | 841 |
| WP_019313659 | 778 | QQRLKGLTDSIK EFGS QILKEHP--VE---NSQLQNDRLFLYYLQNGRDMYTGEEL--D--IDYLSQYDIDHI | 841 |
| WP_019314093 | 778 | QQRLKGLTDSIK EFGS QILKEHP--VE---NSQLQNDRLFLYYLONGRDMYTGEEL--D--IDYLSQYDIDHI | 841 |
| WP_019315370 | 778 | QQRLKGLTDSIK EFGS QILKEHP--VE---NSQLQNDRLFLYYLONGRDMYTGEEL--D--IDYLSQYDIDHI | 841 |
| WP_019803776 | 778 | QQRLKGLTDSIK EFGS QILKEHP--VE---NSQLQNDRLFLYYLONGRDMYTGEEL--D--IDYLSQYDIDHI | 841 |
| WP_019805234 | 778 | QQRLKGLTDSIK EFGS QILKEHP--VE---NSQLQNDRLFLYYLONGRDMYTGEEL--D--IDYLSQYDIDHI | 841 |
| WP_024783594 | 778 | QQRLKGLTDSIK EFGS QILKEHP--VE---NSQLONDRLFLYYLONGRDMYTGEEL--D--IDYLSQYDIDHI | 841 |
| WP_024784288 | 779 | QQRYKRLKEAIK DLNH KILKEHP--TD---NQALONNRLFLYYLONGRDMYTGESL--D--INRLSDYDIDHV | 846 |
| WP_024784666 | 778 | QQRLKGLTDSIK EFGS QILKEHP--VE---HSQLQNDRLFLYYLONGRDMYTGEEL--D--IDYLSQYDIDHI | 841 |
| WP_024784894 | 778 | QQRLKGLTDSIK EFGS QILKEHP--VE---NSQLQNDRLFLYYLONGRDMYTGEEL--D--IDYLSQYDIDHI | 841 |
| WP_024786433 | 779 | QQRYKRLKEAIK DLNH KILKEHP--TD---NQALONNRLFLYYLONGRDMYTGESL--D--INRLSDYDIDHV | 846 |
| WP_049473442 | 778 | QQRLKGLTDSIK EFGS QILKEHP--VE---NSQLQNDRLFLYYLONGRDMYTGEEL--D--IDYLSQYDIDHI | 841 |
| WP_049474547 | 778 | QQRLKGLTDSIK EFGS QILKEHP--VE---NSQLQNDRLFLYYLONGRDMYTGEEL--D--IDYLSQYDIDHI | 841 |
| EMC03581 | 771 | QQRLKGLTDSIK EFGS QILKEHP--VE---HSQLQNDRLFLYYLONGRDMYTGEEL--D--IDYLSQYDIDHI | 834 |
| WP_000428612 | 779 | QQRYKRIEDSLK ILAS KILKEHP--TD---NIQLQNDRLFLYYLONGRDMYTGKPL--D--INQLSSYDIDHI | 846 |
| WP_000428613 | 777 | QQRYKRIEDALK NLAS NILKEHP--TN---NIQLQNDRLFLYYLONGRDMYTGKPL--D--INQLSSYDIDHI | 844 |
| WP_049523028 | 776 | QQRLKTLSDAIS ELG- NILKEHP--TD---NIQLQNDRLFLYYLQNGKDMYTGEAL--D--INQLSNYDIDHI | 839 |
| WP_003107102 | 747 | RERLRKLEEVHK NIGS KILKEHE--IS---NAQLQSDRVYLYLLQDGKDMYTGKDL--D--FDRLSQYDIDHI | 810 |
| WP_054279288 | 779 | RERMKRVQEVLK KLGS QLLKEHP--VE---NFQLQNERLYLYYLONGKDMYTGEEL--S--ISNLSHYDIDHI | 842 |
| WP_049531101 | 777 | QQRYKRIEDSLK ILAS NILKEHP--TD---NIQLQNDRLFLYYLONGKDMYTGNPL--D--INHLSSYDIDHI | 844 |
| WP_049538452 | 777 | QQRYKRIENSLK ILAS KILKEHP--TD---NNQLQNDRLFLYYLONGKDMYTGEAL--D--INQLSSCDIDHI | 844 |
| WP_049549711 | 777 | QQRYKRIEDSLK ILAS NILKENP--TD---NNQLQNDRLFLYYLONGKDMYTGEAL--D--INQLSSYDIDHI | 844 |
| WP_007896501 | 781 | RQRLKKIKEVHK KTGS RILEDNSerIT---NLTLQDNRLYLYLLQDGKDMYTGQDL--D--INNLSQYDIDHI | 846 |
| EFR44625 | 733 | RQRLKKIKEVHK KTGS RILEDNSerIT---NLTLQDNRLYLYLLQDGKDMYTGQDL--D--INNLSQYDIDHI | 798 |
| WP_002897477 | 776 | QQRYKRIEDALK NLAP NILKENP--TD---NIQLKNDRLFLYYLONGKDMYTGKPL--D--INQLSSYDIDHI | 843 |
| WP_002906454 | 776 | QQRYKRIEDALK NLAP NILKENP--TD---NIQLQNDRLFLYYLONGKDMYTGKAI--D--INQLSNYDIDHI | 843 |
| WP_009729476 | 777 | QQRYKRIEDSLK ILAS KILKEHP--TD---NIQLQNDRLFLYYLONGKDMYTGEAL--D--INQLSSCDIDHI | 844 |
| COR24647 | 780 | QQRLGSLTKAIQ DFGS DILKRYP--VE---NNQLQNDQLYLYYLONGKDMYTGDTL--D--IHNLSQYDIDHI | 843 |
| WP_000066813 | 779 | QQRYKRIEDSLK NLAS NILKENP--TD---NIQLQNDRLFLYYLONGRDMYTGKPL--E--INQLSNYDIDHI | 846 |
| WP_009754323 | 777 | QQRYKRIEDALK NLAP TISKENP--TD---NIQLQNDRLFLYYLONGKDMYTGEAL--D--INQLSSYDIDHI | 844 |
| WP_044674937 | 776 | QQRYKKIENAIK NLNS KILKEYP--TN---NQALQNDRLFLYYLONGKDMYTDEEL--D--IDQLSQYDIDHI | 843 |
| WP_044676715 | 778 | QQRYKKIENAIK NLNS KILKEYP--TN---NQALQNDRLFLYYLONGKDMYTDEEL--D--IDQLSQYDIDHI | 845 |
| WP_044680361 | 778 | QQRYKKIENAIK NLNS KILKEYP--TN---NQALQNDRLFLYYLONGKDMYTDEEL--D--IDOLSQYDIDHI | 845 |
| WP_044681799 | 776 | QQRYKKIENAIK NLNS KILKEYP--TN---NQALQNDRLFLYYLONGKDMYTDEEL--D--IDOLSQYDIDHI | 843 |
| WP_049533112 | 778 | QQRLKLLQDSLK PVNI K-----N--VE---NQQLQNDRLFLYYIQNGKDMYTGETL--D--INNLSQYDIDHI | 840 |
| WP_029090905 | 753 | TPRDKFIEKAYA ETDT EHLKELK---Qr--SKQLSSQRLFLYFIQNGKCMYSGEHL--D--IERLDSYEVDHI | 823 |
| WP_006506696 | 777 | ESKIKKLENVYK DEQT SVLEELKg-FDn--TKKISSDSLFLYFTQLGKCMYSGKKL--D--IDSLDKYQIDHI | 849 |
| AIT42264 | 778 | RERMKRIEEGIK ELGS QILKEHP--VE---NTQLQNEKLYLYYLONGRDMYVDQEL--D--INRLSDYDVDHI | 841 |
| WP_034440723 | 785 | KARLKKIQEGLE NLDS HVEKQAL---D---EEMLKSPKYYLYCLONGKDIYTGKDL--D--IGQLQTYDIDHI | 848 |
| AKQ21048 | 778 | RERMKRIEEGIK ELGS QILKEHP--VE---NTQLQNEKLYLYYLONGRDMYVDQEL--D--INRLSDYDVDHI | 841 |
| WP_004636532 | 781 | KERLEKLTEAIK EFDG --VKVKD--LK---NENLRNDRLYLYYLONGRDMYTNEPL--D--INNLSKYDIDHI | 845 |
| WP_002364836 | 789 | IQRLKIVEKAMA EIGS NLLKEQP--TT---NEQLRDTRLFLYYMONGKDMYTGDEL--S--LHRLSHYDIDHI | 852 |
| WP_016631044 | 740 | IQRLKIVEKAMA EIGS NLLKEQP--TT---NEQLRDTRLFLYYMONGKDMYTGDEL--S--LHRLSHYDIDHI | 803 |
| EMS75795 | 525 | KPRLKALEEALK SFDS PLLKEQP--VD---NQALOKDRLYLYYLONGKDMYTGEAL--D--IDRLSEYDIDHI | 588 |
| WP_002373311 | 789 | IQRLKIVEKAMA EIGS NLLKEQP--TT---NEQLRDTRLFLYYMONGKDMYTGDEL--S--LHRLSHYDIDHI | 852 |
| WP_002378009 | 789 | IQRLKIVEKAMA EIGS NLLKEQP--TT---NEQLRDTRLFLYYMONGKDMYTGDEL--S--LHRLSHYDIDHI | 852 |
| WP_002407324 | 789 | IQRLKIVEKAMA EIGS NLLKEQP--TT---NEQLRDTRLFLYYMQNGKDMYTGDEL--S--LHRLSHYDIDHI | 852 |
| WP_002413717 | 789 | IQRLKIVEKAMA EIGS NLLKEQP--TT---NEQLRDTRLFLYYMONGKDMYTGDEL--S--LHRLSHYDIDHI | 852 |
| WP_010775580 | 791 | IQRLKIVEKAMA EIGS NLLKEQP--TT---NEQLRDTRLFLYYMONGKDMYTGDEL--S--LHRLSHYDIDHI | 854 |
| WP_010818269 | 789 | IQRLKIVEKAMA EIGS NLLKEQP--TT---NEQLRDTRLFLYYMONGKDMYTGDEL--S--LHRLSHYDIDHI | 852 |
| WP_010824395 | 789 | IQRLKIVEKAMA EIGS NLLKEQP--TT---NEQLRDTRLFLYYMONGKDMYTGDEL--S--LHRLSHYDIDHI | 852 |
| WP_016622645 | 789 | IQRLKIVEKAMA EIGS NLLKEQP--TT---NEQLRDTRLFLYYMONGKDMYTGDEL--S--LHRLSHYDIDHI | 852 |
| WP_033624816 | 789 | IQRLKIVEKAMA EIGS NLLKEQP--TT---NEQLRDTRLFLYYMONGKDMYTGDEL--S--LHRLSHYDIDHI | 852 |
| WP_033625576 | 789 | IQRLKIVEKAMA EIGS NLLKEQP--TT---NEQLRDTRLFLYYMONGKDMYTGDEL--S--LHRLSHYDIDHI | 852 |
| WP_033789179 | 789 | IQRLKIVEKAMA EIGS NLLKEQP--TT---NEQLRDTRLFLYYMONGKDMYTGDEL--S--LHRLSHYDIDHI | 852 |
| WP_002310644 | 789 | RPRLKALEESLK DFGS QLLKEYP--TD---NSSLOKDRLYLYYLONGRDMYTGAPL--D--IHRLSDYDIDHI | 852 |
| WP_002312694 | 790 | RPRLKALEESLK DFGS QLLKEYP--TD---NSSLOKDRLYLYYLONGRDMYTGAPL--D--IHRLSDYDIDHI | 853 |
| WP_002314015 | 790 | RPRLKALEESLK DFGS QLLKEYP--TD---NSSLOKDRLYLYYLONGRDMYTGAPL--D--IHRLSDYDIDHI | 853 |
| WP_002320716 | 790 | RPRLKALEESLK DFGS QLLKEYP--TD---NSSLOKDRLYLYYLONGRDMYTGAPL--D--IHRLSDYDIDHI | 853 |
| WP_002330729 | 789 | RPRLKALEESLK DFGS QLLKEYP--TD---NSSLOKDRLYLYYLONGRDMYTGAPL--D--IHRLSDYDIDHI | 852 |
| WP_002335161 | 790 | RPRLKALEESLK DFGS QLLKEYP--TD---NSSLOKDRLYLYYLONGRDMYTGAPL--D--IHRLSDYDIDHI | 853 |
| WP_002345439 | 790 | RPRLKALEESLK DFGS QLLKEYP--TD---NSSLOKDRLYLYYLONGRDMYTGAPL--D--IHRLSDYDIDHI | 853 |
| WP_034867970 | 781 | SPRLKALENGLK QIGS TLLKEQP--TD---NKALQKERLYLYYLONGRDMYTGEPL--E--IENLHQYEVDHI | 844 |
| WP_047937432 | 790 | RPRLKALEESLK DEGS QLLKEYP--TD---NSSLOKDRLYLYYLONGRDMYTGAPL--D--IHRLSDYDIDHI | 853 |
| WP_010720994 | 781 | KPRLKALENGLK QIGS TLLKEQP--TD---NKALQKERLYLYYLONGRDMYTGEPL--E--IENLHQYEVDHI | 844 |
| WP_010737004 | 781 | SPRLKALENGLK QIGS TLLKEQP--TD---NKALQKERLYLYYLONGRDMYTGEPL--E--IENLHQYEVDHI | 844 |
| WP_034700478 | 781 | KPRLKALENGLK QIGS TLLKEQP--TD---NKALQKERLYLYYLONGRDMYTGEPL--E--IENLHQYEVDHI | 844 |
| WP_007209003 | 782 | KPRLKGIENGLK EFSD SVLKGSS--ID---NKQLQNDRLYLYYLQNGKDMYTGHEL--D--IDHLSTYDIDHI | 845 |
| WP_023519017 | 775 | RPRLKALEEALK NIDS PLLKDYP--TD---NQALQKDRLYLYYLONGKDMYTGEPL--E--IHRLSEYDIDHI | 838 |
| WP_010770040 | 782 | NPRMKALEEAMR NLRS NLLKEYP--TD---NQALQNDRLYLYYLONGKDMYTGLDL--S--LHNLSSYDIDHI | 845 |
| WP_048604708 | 779 | RPRLKNLEKAID DLDS EILKKHP--VD---NKALQKDRLYLYYLONGKDMYTNEEL--D--IHKLSTYDIDHI | 842 |
| WP_010750235 | 784 | KPRLKSLEEALK NEDS QLLKERP--VD---NQSLOKDRLYLYYLONGKDMYTGESL--D--IDRLSEYDIDHI | 847 |
| AII16583 | 817 | RERMKRIEEGIK ELGS QILKEHP--VE---NTQLQNEKLYLYYLONGRDMYVDQEL--D--INRLSDYDVDHI | 880 |
| WP_029073316 | 789 | DSFVNQMLKLYK DFED EANKHLKg-EDa--KSKIRSERLKLYYTQMGKCMYTGKSL--D--IDRLDTYQVDHI | 860 |
| WP_031589969 | 789 | DSFVNQMLKLYK DFED EANKHLKg-EDa--KSKIRSERLKLYYTQMGKCMYTGKSL--D--IDRLDTYQVDHI | 860 |
| KDA45870 | 772 | EDRVQQIVKNLK ELPK ------P---S---NAELSDERKYLYCLONGRDMYTGAPL--D--YDHLQFYDVDHI | 833 |
| WP_039099354 | 789 | KRQVEQVYQNIS EL-- EIRNELK---D1-SNSALSNTRLFLYFMQGGRDMYTGDSL--N--IDRLSTYDIDHI | 856 |
| AKP02966 | 786 | RLQSKLLNKANG -LVP EELKKHKn--D------LSSERIMLYFLONGKSLYSEESL--N--INKLSDYQVDHI | 858 |
| WP_010991369 | 781 | RPRYKSLEKAIK EFGS QILKEHP--TD---NQELRNNRLYLYYLONGKDMYTGQDL--D--IHNLSNYDIDHI | 844 |
| WP_033838504 | 781 | RPRYKSLEKAIK EFGS QILKEHP--TD---NQELRNNRLYLYYLQNGKDMYTGQDL--D--IHNLSNYDIDHI | 844 |
| EHN60060 | 784 | RPRYKSLEKAIK EFGS QILKEHP--TD---NQELRNNRLYLYYLONGKDMYTGQDL--D--IHNLSNYDIDHI | 847 |
| EFR89594 | 550 | RPRYKSLEKAIK EFGS QILKEHP--TD---NQELKNNRLYLYYLONGKDMYTGQDL--D--IHNLSNYDIDHI | 613 |
| WP_038409211 | 781 | KPRFISLEKAIK EFGS QILKEHP--TD---NQCLKNDRLYLYYLONGKDMYTGKEL--D--IHNLSNYDIDHI | 844 |
| EFR95520 | 400 | KPRFISLEKAIK EFGS QILKEHP--TD---NQCLKNDRLYLYYLONGKDMYTGKEL--D--IHNLSNYDIDHI | 463 |
| WP_003723650 | 781 | KPRYKSLEKAIK EFGS QILKEHP--TD---NQELKNNRLYLYYLONGKDMYTGQEL--D--IHNLSNYDIDHI | 844 |
| WP_003727705 | 781 | KPRYKSLEKAIK DFGS QILKEHP--TD---NQELKNNRLYLYYLONGKDIYTGQEL--D--IHNLSNYDIDHI | 844 |
| WP_003730785 | 781 | KPRYKSLEKAIK DFGS QILKEHP--TD---NQELKNNRLYLYYLONGKDIYTGQEL--D--IHNLSNYDIDHI | 844 |
| WP_003733029 | 781 | KPRYKSLEKAIK EFGS QILKEHP--TD---NQELKNNRLYLYYLQNGKDMYTGQEL--D--IHNLSNYDIDHI | 844 |
| WP_003739838 | 781 | RPRYKSLEKAIK EFGS QILKEHP--TD---NQELRNNRLYLYYLONGKDMYTGQEL--D--IHNLSNYDIDHI | 844 |
| WP_014601172 | 781 | KPRYKSLEKAIK EFGS KILKEHP--TD---NQELKNNRLYLYYLONGKDMYTGQEL--D--IHNLSNYDIDHI | 844 |
| WP_023548323 | 781 | KPRYKSLEKAIK EFGS QILKEHP--TD---NQELKNNRLYLYYLONGKDMYTGQEL--D--IHNLSNYDIDHI | 844 |
| WP_031665337 | 781 | KPRYKSLEKAIK EFGS QILKEHP--TD---NQELKNNRLYLYYLONGKDMYTGQEL--D--IHNLSNYDIDHI | 844 |
| WP_031669209 | 781 | KPRYKSLEKAIK EFGS QILKEHP--TD---NQELKNNRLYLYYLONGKDMYTGQEL--D--IHNLSNYDIDHI | 844 |
| WP_033920898 | 781 | KPRYKSLEKAIK EFGS QILKEHP--TD---NQELKNNRLYLYYLONGKDMYTGQEL--D--IHNLSNYDIDHI | 844 |
| AKI42028 | 784 | KPRYKSLEKAIK EFGS KILKEHP--TD---NQELKNNRLYLYYLONGKDMYTGQEL--D--IHNLSNYDIDHI | 847 |
| AKI50529 | 784 | KPRYKSLEKAIK EFGS QILKEHP--TD---NQELKNNRLYLYYLONGKDMYTGQEL--D--IHNLSNYDIDHI | 847 |
| EFR83390 | 229 | RPRYKSLEKAIK EFGS QILKEHP--TD---NQELKNNRLYLYYLONGKDIYTGQEL--D--IHNLSNYDIDHI | 292 |
| WP_046323366 | 781 | KPRFTSLEKAIK ELGS QILKEHP--TD---NQGLKNDRLYLYYLONGKDMYTGQEL--D--IHNLSNYDIDHV | 844 |
| AKE81011 | 794 | RERMKRIEEGIK ELGS QILKEHP--VE---NTQLQNEKLYLYYLONGRDMYVDQEL--D--INRLSDYDVDHI | 857 |
| CUO82355 | 781 | ESKIKKLENVYK DEQT SVLEELKg-FDn--TKKISSDSLFLYFTQLGKCMYSGKKL--D--IDSLDKYQIDHI | 853 |
| WP_033162887 | 784 | ESKIAKLQKIYE NLQT QVYESLKK-EDa--KKRMETDALYLYYLQMGKSMYSGKPL--D--IDKLSTYQIDHI | 855 |
| AGZ01981 | 811 | RERMKRIEEGIK ELGS QILKEHP--VE---NTQLQNEKLYLYYLONGRDMYVDQEL--D--INRLSDYDVDHI | 874 |
| AKA60242 | 778 | RERMKRIEEGIK ELGS QILKEHP--VE---NTQLQNEKLYLYYLONGRDMYVDQEL--D--INRLSDYDVDAI | 841 |
| AKS40380 | 778 | RERMKRIEEGIK ELGS QILKEHP--VE---NTQLQNEKLYLYYLONGRDMYVDQEL--D--INRLSDYDVDHI | 841 |
| 4UN5_B | 782 | RERMKRIEEGIK ELGS QILKEHP--VE---NTQLQNEKLYLYYLONGRDMYVDQEL--D--INRLSDYDVDAI | 845 |
| WP_010922251 | 842 | [chemical structure] | 910 |
| WP_039695303 | 852 | IPQAFIKDDSIDNRVLTSSAKNRG-KSDD--VP S--LDIVRARKA-EWVRLYKSGLISKRKFDNLTKA--ERGGLTE | 920 |
| WP_045635197 | 844 | IPQAFIKDDSLDNRVLTSSKDNRG-KSDN--VP S--IEVVQKRKA-FWQQLLDSKLISERKENNLTKA--ERGGLDE | 912 |
| 5AXW_A | 562 | IPRSVSFDNSFNNKVLVKQEEASK-KGNR--TP Fqy-LSSSDSKI-SYETFKKHILNLAKGKGRISKTk-KEYLLEE | 632 |
| WP_009880683 | 526 | VPQSFLKDDSIDNKVLTRSDKNRG-KSDN--VP S--EEVVKKMKN-YWKQLLNAKLITORKFDNLTKA--ERGGLSE | 594 |
| WP_010922251 | 842 | VPQSFLKDDSIDNKVLTRSDKNRG-KSDN--VP S--EEVVKKMKN-YWROLLNAKLITQRKFDNLTKA--ERGGLSE | 910 |
| WP_011054416 | 842 | VPQSFLKDDSIDNKVLTRSDKNRG-KSDN--VP S--EEVVKKMKN-YWROLLNAKLITORKFDNLTKA--ERGGLSE | 910 |
| WP_011284745 | 842 | VPQSFIKDDSIDNKVLTRSDKNRG-KSNN--VP S--EEVVKKMKN-YWROLLNAKLITORKFDNLTKA--ERGGLSE | 910 |
| WP_011285506 | 842 | VPQSFLKDDSIDNKVLTRSDKNRG-KSDN--VP S--EEVVKKMKN-YWROLLNAKLITORKFDNLTKA--ERGGLSE | 910 |
| WP_011527619 | 842 | VPQSFIKDDSIDNKVLTRSDKNRG-KSDN--VP S--EEVVKKMKN-YWRQLLNAKLITQRKFDNLTKA--ERGGLSE | 910 |
| WP_012560673 | 842 | VPQSFLKDDSIDNKVLTRSDKNRG-KSDN--VP S--EEVVKKMKN-YWKOLLNAKLITQRKFDNLTKA--ERGGLSE | 910 |
| WP_014407541 | 841 | VPQSFIKDDSIDNKVLTRSDKNRG-KSDN--VP S--EEVVKKMKN-YWROLLNAKLITQRKFDNLTKA--ERGGLSE | 909 |
| WP_020905136 | 842 | VPQSFIKDDSIDNKVLTRSDKNRG-KSDN--VP S--EEVVKKMKN-YWROLLNAKLITORKFDNLTKA--ERGGLSE | 910 |
| WP_023080005 | 841 | VPQSFLKDDSIDNKVLTRSDKNRG-KSDN--VP S--EEVVKKMKN-YWROLLNAKLITORKFDNLTKA--ERGGLSE | 909 |
| WP_023610282 | 841 | VPQSFLKDDSIDNKVLTRSDKNRG-KSDN--VP S--EEVVKKMKN-YWROLLNAKLITQRKFDNLTKA--ERGGLSE | 909 |
| WP_030125963 | 842 | VPQSFIKDDSIDNKVLTRSDKNRG-KSDN--VP S--EEVVKKMKN-YWROLLNAKLITORKFDNLTKA--ERGGLSE | 910 |
| WP_030126706 | 842 | VPQSFLKDDSIDNKVLTRSDKNRG-KSDN--VP S--EEVVKKMKN-YWROLLNAKLITORKFDNLTKA--ERGGLSE | 910 |
| WP_031488318 | 842 | VPQSFIKDDSIDNKVLTRSDKNRG-KSDN--VP S--EEVVKKMKN-YWKOLLNAKLITQRKFDNLTKA--ERGGLSE | 910 |
| WP_032460140 | 842 | VPQSFLKDDSIDNKVLTRSDKNRG-KSDN--VP S--EEVVKKMKN-YWKOLLNAKLITQRKFDNLTKA--ERGGLSE | 910 |
| WP_032461047 | 842 | VPQSFLKDDSIDNKVLTRSDKNRG-KSDN--VP S--EEVVKKMKN-YWKQLLNAKLITORKFDNLTKA--ERGGLSE | 910 |
| WP_032462016 | 842 | VPQSFLKDDSIDNKVLTRSDKNRG-KSDN--VP S--EEVVKKMKN-YWROLLNAKLITORKFDNLTKA--ERGGLSE | 910 |
| WP_032462936 | 842 | VPQSFLKDDSIDNKVLTRSDKNRG-KSDN--VP S--EEVVKKMKN-YWKOLLNAKLITQRKFDNLTKA--ERGGLSE | 910 |
| WP_032464890 | 842 | VPQSFIKDDSIDNKVLTRSDKNRG-KSDN--VP S--EEVVKKMKN-YWROLLNAKLITQRKFDNLTKA--ERGGLSE | 910 |
| WP_033888930 | 667 | VPQSFLKDDSIDNKVLTRSDKNRG-KSDN--VP S--EEVVKKMKN-YWRQLLNAKLITORKFDNLTKA--ERGGLSE | 735 |
| WP_038431314 | 842 | VPQSFLKDDSIDNKVLIRSDKNRG-KSDN--VP S--EEVVKKMKN-YWROLLNAKLITQRKFDNLTKA--ERGGLSE | 910 |
| WP_038432938 | 841 | VPQSFLKDDSIDNKVLTRSDKNRG-KSDN--VP S--EEVVKKMKN-YWROLLNAKLITORKFDNLTKA--ERGGLSE | 909 |
| WP_038434062 | 842 | VPQSFLKDDSIDNKVLTRSDKNRG-KSDN--VP S--EEVVKKMKN-YWKOLLNAKLITORKFDNLTKA--ERGGLSE | 910 |
| BAQ51233 | 753 | VPQSFLKDDSIDNKVLTRSDKNRG-KSDN--VP S--EEVVKKMKN-YWROLLNAKLITORKFDNLTKA--ERGGLSE | 821 |
| KGE60162 | 17 | VPQSFLKDDSIDNKVLTRSDKNRG-KSDN--VP S--EEVVKKMKN-YWROLLNAKLITORKFDNLTKA--ERGGLSE | 85 |
| KGE60856 | | --------------------------------- -------------------------------------------- | |
| WP_002989955 | 842 | VPQSFIKDDSIDNKVLTRSDKNRG-KSDN--VP S--EEVVKKMKN-YWROLLNAKLITQRKFDNLTKA--ERGGLSE | 910 |
| WP_003030002 | 841 | IPQAFIKDNSLDNRVLTRSDKNRG-KSDD--VP S--IEVVHEMKS-FWSKLLSVKLITQRKFDNLTKA--ERGGLTE | 909 |
| WP_003065552 | 852 | IPQAFIKDDSIDNRVLTSSAKNRG-KSDD--VP S--LDIVRARKA-EWVRLYKSGLISKRKFDNLTKA--ERGGLTE | 920 |
| WP_001040076 | 847 | IPQAFIKDDSIDNRVLVSSAKNRG-KSDD--VP S--LEIVKDCKV-FWKKLLDAKLMSQRKYDNLTKA--ERGGLTS | 915 |
| WP_001040078 | 847 | IPQAFIKDDSIDNRVLVSSAKNRG-KSDD--VP S--LEIVKDCKV-FWKKLLDAKLMSQRKYDNLTKA--ERGGLTS | 915 |
| WP_001040080 | 847 | IPQAFIKDDSIDNRVLVSSAKNRG-KSDD--VP S--LEIVKDCKV-FWKKLLDAKLMSQRKYDNLTKA--ERGGLTS | 915 |
| WP_001040081 | 847 | IPQAFIKDDSIDNRVLVSSAKNRG-KSDD--VP S--LEIVKDCKV-FWKKLLDAKLMSQRKYDNLTKA--ERGGLTS | 915 |
| WP_001040083 | 847 | IPQAFIKDDSIDNRVLVSSAKNRG-KSDD--VP S--LEIVKDCKV-FWKKLLDAKLMSQRKYDNLTKA--ERGGLTS | 915 |
| WP_001040085 | 847 | IPQAFIKDDSIDNRVLVSSAKNRG-KSDD--VP S--LEIVKDCKV-FWKKLLDAKLMSQRKYDNLTKA--ERGGLTS | 915 |
| WP_001040087 | 847 | IPQAFIKDDSIDNRVLVSSAKNRG-KSDD--VP S--LEIVKDCKV-FWKKLLDAKLMSQRKYDNLTKA--ERGGLTS | 915 |
| WP_001040088 | 847 | IPQAFIKDDSIDNRVLVSSAKNRG-KSDD--VP S--LEIVKDCKV-FWKKLLDAKLMSQRKYDNLTKA--ERGGLTS | 915 |
| WP_001040089 | 847 | IPQAFIKDDSIDNRVLVSSAKNRG-KSDD--VP S--LEIVKDCKV-FWKKLLDAKLMSQRKYDNLTKA--ERGGLTS | 915 |
| WP_001040090 | 847 | IPQAFIKDDSIDNRVLVSSAKNRG-KSDD--VP S--LEIVKDCKV-FWKKLLDAKLMSQRKYDNLTKA--ERGGLTS | 915 |
| WP_001040091 | 847 | IPQAFIKDDSIDNRVLVSSAKNRG-KSDD--VP S--LEIVKDCKV-FWKKLLDAKLMSQRKYDNLTKA--ERGGLTS | 915 |
| WP_001040092 | 847 | VPQAFIKDDSIDNRVLVSSAKNRG-KSDD--VP S--IDIVKARKA-FWKKLLDAKLISQRKYDNLTKA--ERGGLTP | 915 |
| WP_001040094 | 847 | IPQAFIKDDSIDNRVLVSSAKNRG-KSDD--VP S--VEIVKDCKV-FWKKLLDAKLMSQRKYDNLTKA--ERGGLTS | 915 |
| WP_001040095 | 847 | IPQAFIKDDSIDNRVLVSSAKNRG-KSDD--VP S--LEIVKDCKV-FWKKLLDAKLMSQRKYDNLTKA--ERGGLTS | 915 |
| WP_001040096 | 847 | IPQAFIKDDSIDNRVLVSSAKNRG-KSDD--VP S--LEIVKDCKV-FWKKLLDAKLMSQRKYDNLTKA--ERGGLTS | 915 |
| WP_001040097 | 847 | IPQAFIKDDSIDNRVLVSSAKNRG-KSDD--VP S--VEIVKDCKV-FWKKLLDAKLMSQRKYDNLTKA--ERGGLTS | 915 |
| WP_001040098 | 847 | IPQAFIKDDSIDNRVLVSSAKNRG-KSDD--VP S--VEIVKDCKV-FWKKLLDAKLMSQRKYDNLTKA--ERGGLTS | 915 |
| WP_001040099 | 847 | IPQAFIKDDSIDNRVLVSSAKNRG-KSDD--VP S--VEIVKDCKV-FWKKLLDAKLMSORKYDNLTKA--ERGGLTS | 915 |
| WP_001040100 | 847 | IPQAFIKDDSIDNRVLVSSAKNRG-KSDD--VP S--VEIVKDCKV-FWKKLLDAKLMSQRKYDNLTKA--ERGGLTS | 915 |
| WP_001040104 | 847 | IPQAFIKDDSIDNRVLVSSAKNRG-KSDD--VP S--LEIVKDCKV-FWKKLLDAKLMSQRKYDNLTKA--ERGGLTS | 915 |
| WP_001040105 | 847 | IPQAFIKDDSIDNRVLVSSAKNRG-KSDD--VP S--LEIVKDCKV-FWKKLLDAKLMSQRKYDNLTKA--ERGGLTS | 915 |
| WP_001040106 | 847 | VPQAFIKDDSIDNRVLVSSAKNRG-KSDN--VP S--IDIVKARKA-FWKKLLDAKLMSQRKYDNLTKA--ERGGLTS | 915 |
| WP_001040107 | 847 | VPQAFIKDDSIDNRVLVSSAKNRG-KSDN--VP S--IDIVKARKA-FWKKLLDAKLMSORKYDNLTKA--ERGGLTS | 915 |
| WP_001040108 | 847 | VPQAFIKDDSIDNRVLVSSAKNRG-KSDN--VP S--IDIVKARKA-FWKKLLDAKLMSQRKYDNLTKA--ERGGLTS | 915 |
| WP_001040109 | 847 | VPQAFIKDDSIDNRVLVSSAKNRG-KSDN--VP S--IDIVKARKA-FWKKLLDAKLMSORKYDNLTKA--ERGGLTS | 915 |
| WP_001040110 | 847 | VPQAFIKDDSIDNRVLVSSAKNRG-KSDN--VP S--IDIVKARKA-FWKKLLDAKLMSQRKYDNLTKA--ERGGLTS | 915 |
| WP_015058523 | 847 | VPQAFIKDDSIDNRVLVSSAKNRG-KSDD--VP S--IDIVKARKA-FWKKLLDAKLISQRKYDNLTKA--ERGGLTP | 915 |
| WP_017643650 | 847 | IPQAFIKDDSIDNRVLVSSAKNRG-KSDD--VP S--VEIVKDCKV-FWKKLLDAKLMSQRKYDNLTKA--ERGGLTS | 915 |
| WP_017647151 | 847 | IPQAFIKDDSIDNRVLVSSAKNRG-KSDD--VP S--LEIVKDCKV-FWKKLLDAKLMSQRKYDNLTKA--ERGGLTS | 915 |
| WP_017648376 | 847 | IPQAFIKDDSIDNRVLVSSAKNRG-KSDD--VP S--LEIVKDCKV-FWKKLLDAKLMSQRKYDNLTKA--ERGGLTS | 915 |
| WP_017649527 | 847 | IPQAFIKDDSIDNRVLVSSAKNRG-KSDD--VP S--LEIVKDCKV-FWKKLLDAKLMSQRKYDNLTKA--ERGGLTS | 915 |
| WP_017771611 | 847 | VPQAFIKDDSIDNRVLVSSAKNRG-KSDN--VP S--IDIVKARKA-FWKKLLDAKLMSQRKYDNLTKA--ERGGLTS | 915 |
| WP_017771984 | 847 | IPQAFIKDDSIDNRVLVSSAKNRG-KSDD--VP S--LEIVKDCKV-FWKKLLDAKLMSORKYDNLTKA--ERGGLTS | 915 |
| CFQ25032 | 847 | IPQAFIKDDSIDNRVLVSSAKNRG-KSDD--VP S--LEIVKDCKV-FWKKLLDAKLMSQRKYDNLTKA--ERGGLTS | 915 |
| CFV16040 | 847 | IPQAFIKDDSIDNRVLVSSAKNRG-KSDD--VP S--LEIVKDCKV-FWKKLLDAKLMSQRKYDNLTKA--ERGGLTS | 915 |
| KLJ37842 | 847 | IPQAFIKDDSIDNRVLVSSAKNRG-KSDD--VP S--LEIVKDCKV-FWKKLLDAKLMSQRKYDNLTKA--ERGGLTS | 915 |
| KLJ72361 | 847 | IPQAFIKDDSIDNRVLVSSAKNRG-KSDD--VP S--LEIVKDCKV-FWKKLLDAKLMSQRKYDNLTKA--ERGGLTS | 915 |
| KLL20707 | 861 | IPQAFIKDDSIDNRVLVSSAKNRG-KSDD--VP S--LEIVKDCKV-FWKKLLDAKLMSQRKYDNLTKA--ERGGLTS | 929 |
| KLL42645 | 847 | VPQAFIKDDSIDNRVLVSSAKNRG-KSDN--VP S--IDIVKARKA-FWKKLLDAKLMSQRKYDNLTKA--ERGGLTS | 915 |
| WP_047207273 | 847 | IPQAFIKDDSIDNRVLVSSAKNRG-KSDD--VP S--LEIVKDCKV-FWKKLLDAKLMSQRKYDNLTKA--ERGGLTS | 915 |
| WP_047209694 | 847 | IPQAFIKDDSIDNRVLVSSAKNRG-KSDD--VP S--VEIVKDCKV-FWKKLLDAKLMSQRKYDNLTKA--ERGGLTS | 915 |
| WP_050198062 | 847 | IPQAFIKDDSIDNRVLVSSAKNRG-KSDD--VP S--LEIVKDCKV-FWKKLLDAKLMSQRKYDNLTKA--ERGGLTS | 915 |
| WP_050201642 | 847 | IPQAFIKDDSIDNRVLVSSAKNRG-KSDD--VP S--LEIVKDCKV-FWKKLLDAKLMSQRKYDNLTKA--ERGGLTS | 915 |
| WP_050204027 | 847 | VPQAFIKDDSIDNRVLVSSAKNRG-KSDN--VP S--IDIVKARKA-FWKKLLDAKLMSQRKYDNLTKA--ERGGLTS | 915 |
| WP_050881965 | 847 | IPQAFIKDDSIDNRVLVSSAKNRG-KSDD--VP S--LEIVKDCKV-FWKKLLDAKLMSQRKYDNLTKA--ERGGLTS | 915 |
| WP_050886065 | 847 | IPQAFIKDDSIDNRVLVSSAKNRG-KSDD--VP S--LEIVKDCKV-FWKKLLDAKLMSQRKYDNLTKA--ERGGLTS | 915 |
| AHN30376 | 847 | VPQAFIKDDSIDNRVLVSSAKNRG-KSDD--VP S--IDIVKARKA-FWKKLLDAKLISQRKYDNLTKA--ERGGLTP | 915 |
| EAO78426 | 847 | IPQAFIKDDSIDNRVLVSSAKNRG-KSDD--VP S--LEIVKDCKV-FWKKLLDAKLMSQRKYDNLTKA--ERGGLTS | 915 |
| CCW42055 | 847 | IPQAFIKDDSIDNRVLVSSAKNRG-KSDD--VP S--LEIVKDCKV-FWKKLLDAKLMSQRKYDNLTKA--ERGGLTS | 915 |
| WP_003041502 | 841 | IPQAYIKDDSFDNRVLTSSSENRG-KSDN--VP S--IEVVCARKA-DWMRLRKAGLISQRKFDNLTKA--ERGGLTE | 909 |
| WP_037593752 | 842 | IPQAFIKDNSLDNRVLTRSDKNRG-KSDD--VP S--IEVVHEMKS-FWSKLLSVKLITQRKFDNLTKA--ERGGLTE | 910 |
| WP_049516684 | 842 | IPQAFIKDNSLDNRVLTRSDKNRG-KSDD--VP S--IEVVHEMKS-FWSKLLSVKLITQRKFDNLTKA--ERGGLTE | 910 |
| GAD46167 | 841 | IPQAFIKDNSLDNRVLTRSDKNRG-KSDD--VP S--IEVVHEMKS-FWSKLLSVKLITQRKFDNLTKA--ERGGLTE | 909 |
| WP_018363470 | 850 | IPQAFIKDDSIDNRVLTSSAKNRG-KSDD--VP S--LGIVRARKA-EWVRLYKSGLISKRKFDNLTKA--ERGGLTE | 918 |
| WP_003043819 | 851 | VPQSFIKDDSIDNKVLTRSVENRG-KSDN--VP S--EEVVKKMKN-YWROLLNAKLITORKFDNLTKA--ERGGLSE | 919 |
| WP_006269658 | 841 | IPQAFIKDNSLDNRVLTRSDKNRG-KSDD--VP S--IEVVHEMKS-FWSKLLSVKLITORKFDNLTKA--ERGGLTE | 909 |
| WP_048800889 | 841 | IPQAFIKDDSIDNRVLTSSAKNRG-KSDN--VP N--LEVVCDRKA-DWIRLREAGLISQRKFDNLTKA--ERGGLTE | 909 |
| WP_012767106 | 841 | VPQSFIKDDSIDNKILTRSDKNRG-KSDN--VP S--EEVVKKMKN-YWROLLNAKLITORKFDNLTKA--ERGGLSE | 909 |
| WP_014612333 | 841 | VPQSFIKDDSIDNKVLTRSDKNRG-KSDN--VP S--EEVVKKMKN-YWROLLNAKLITQRKFDNLTKA--ERGGLSE | 909 |
| WP_015017095 | 841 | VPQSFIKDDSIDNKVLTRSDKNRG-KSDD--VP S--EEVVKKMKN-YWROLLNAKLITQRKFDNLTKA--ERGGLSE | 909 |
| WP_015057649 | 841 | VPQSFIKDDSIDNKVLTRSDKNRG-KSDN--VP S--EEVVKKMKN-YWRQLLNAKLITORKFDNLTKA--ERGGLSE | 909 |
| WP_048327215 | 841 | VPQSFIKDDSIDNKVLTRSDKNRG-KSDD--VP S--EEVVKKMKN-YWRQLLNAKLITORKFDNLTKA--ERGGLSE | 909 |
| WP_049519324 | 841 | VPQSFIKDDSIDNKVLTRSDKNRG-KSDN--VP S--EEVVKKMKN-YWROLLNAKLITORKFDNLTKA--ERGGLSE | 909 |
| WP_012515931 | 841 | IPQSFIKNNSIDNKVLTSQGANRG-KLDN--VP S--EAIVRKMKG-YWQSLLRAGAISKQKFDNLTKA--ERGGLTQ | 909 |
| WP_021320964 | 841 | IPQSFIKNNSIDNKVLTSQGANRG-KLDN--VP S--EAIVRKMKG-YWQSLLRAGAISKQKFDNLTKA--ERGGLTQ | 909 |
| WP_037581760 | 841 | IPQSFIKNNSIDNKVLTSQGANRG-KLDN--VP S--EAIVRKMKG-YWQSLLRAGAISKQKFDNLTKA--ERGGLTQ | 909 |
| WP_004232481 | 849 | IPQAFIKDNSIDNRVLTSSAKNRG-KSDD--VP S--IEIVRNRKS-YWYKLYKSGLISKRKFDNLTKA--ERGGLTE | 917 |
| WP_009854540 | 850 | IPQAFIKDDSIDNRVLTSSAKNRG-KSDD--VP S--LDIVRARKA-EWVRLYKSGLISKRKFDNLTKA--ERGGLTE | 918 |
| WP_012962174 | 850 | IPQAFIKDDSIDNRVLTSSAKNRG-KSDD--VP S--LDIVHDRKA-DWIRLYKSGLISKRKFDNLTKA--ERGGLTE | 918 |
| WP_039695303 | 852 | IPQAFIKDDSIDNRVLTSSAKNRG-KSDD--VP S--LDIVRARKA-EWVRLYKSGLISKRKFDNLTKA--ERGGLTE | 920 |
| WP_014334983 | 849 | IPQAFIKDNSIDNKVLTSSAKNRG-KSDD--VP S--IEIVRNRRS-YWYKLYKSGLISKRKFDNLTKA--ERGGLTE | 917 |
| WP_003099269 | 842 | IPQSFIKDNSIDNTVLTTQASNRG-KSDN--VP N--IETVNKMKS-FWYKQLKSGAISQRKFDHLTKA--ERGALSD | 910 |
| AHY15608 | 842 | IPQSFIKDNSIDNTVLTTQASNRG-KSDN--VP N--IETVNKMKS-FWYKQLKSGAISQRKFDHLTKA--ERGALSD | 910 |
| AHY17476 | 842 | IPQSFIKDNSIDNTVLTTQASNRG-KSDN--VP N--IETVNKMKS-FWYKQLKSGAISQRKFDHLTKA--ERGALSD | 910 |
| ESR09100 | | --------------------------------- -------------------------------------------- | |
| AGM98575 | 842 | IPQSFIKDNSIDNTVLTTQASNRG-KSDN--VP N--IETVNKMKS-FWYKQLKSGAISQRKFDHLTKA--ERGALSD | 910 |
| ALF27331 | 842 | IPQAFIKDNSIDNRVLTSSKENRG-KSDD--VP S--KDVVRKMKS-YWSKLLSAKLITORKFDNLTKA--ERGGLTD | 910 |
| WP_018372492 | 858 | VPRSYIKNDSFDNKVLTTSKGNRK-KLDD--VP A--KEVVEKMEN-TWRRLHAAGLISDIKLSYLMKGe-----LTE | 923 |
| WP_045618028 | 845 | IPQAFIKDDSLDNRVLISSKDNRG-KSDN--VP S--LEIVOKRKA-FWQQLLDSKLISERKENNLTKA--ERGGLDE | 913 |
| WP_045635197 | 844 | IPQAFIKDDSLDNRVLISSKDNRG-KSDN--VP S--IEVVQKRKA-FWQQLLDSKLISERKENNLTKA--ERGGLDE | 912 |
| WP_002263549 | 842 | IPQAFIKDNSIDNRVLTSSKENRG-KSDD--VP S--KDVVRKMKS-YWSKLLSAKLITQRKFDNLTKA--ERGGLTD | 910 |
| WP_002263887 | 842 | IPQAFIKDNSIDNRVLTSSKENRG-KSDD--VP S--KDVVRKMKS-YWSKLLSAKLITORKFDNLTKA--ERGGLTD | 910 |
| WP_002264920 | 842 | IPQAFIKDNSIDNRVLTSSKENRG-KSDD--VP S--KDVVRKMKS-YWSKLLSAKLITQRKFDNLTKG--ERGGLTD | 910 |
| WP_002269043 | 842 | IPQAFIKDNSIDNRVLTSSKENRG-KSDD--VP S--KDVVRKMKS-YWSKLLSAKLITQRKFDNLTKA--ERGGLTD | 910 |
| WP_002269448 | 842 | IPQAFIKDNSIDNRVLTSSKENRG-KSDD--VP S--EDVVRKMKS-YWSKLLSAKLITORKFDNLTKA--ERGGLTD | 910 |
| WP_002271977 | 842 | IPQAFIKDNSIDNRVLTSSKENRG-KSDD--VP S--KDVVRKMKS-YWSKLLSAKLITORKFDNLTKA--ERGGLTD | 910 |
| WP_002272766 | 842 | IPQAFIKDNSIDNRVLTSSKENRG-KSDD--VP S--KDVVRKMKP-YWSKLLSAKLITORKFDNLTKA--ERGGLTD | 910 |
| WP_002273241 | 842 | IPQAFIKDNSIDNRVLTSSKENRG-KSDD--VP S--KDVVRKMKS-YWSKLLSAKLITQRKFDNLTKA--ERGGLTD | 910 |
| WP_002275430 | 842 | IPQAFIKDNSIDNRVLTSSKENRG-KSDD--VP S--KDVVRKMKP-YWSKLLSAKLITORKFDNLTKA--ERGGLTD | 910 |
| WP_002276448 | 842 | IPQAFIKDNSIDNRVLTSSKENRG-KSDD--VP S--KDVVRKMKS-YWSKLLSAKLITORKFDNLTKA--ERGGLTD | 910 |
| WP_002277050 | 847 | IPQAFIKDNSIDNRVLTSSKANRG-KSDD--VP S--EDVVNRMRP-FWNKLLSSGLISQRKYNNLTKK--E---LTP | 912 |
| WP_002277364 | 842 | IPQAFIKDNSIDNRVLTSSKENRG-KSDD--VP S--KNVVRKMKS-YWSKLLSAKLITQRKFDNLTKA--ERGGLTD | 910 |
| WP_002279025 | 842 | IPQAFIKDNSIDNRVLTSSKENRG-KSDD--VP S--KDVVRKMKP-YWSKLLSAKLITORKFDNLTKA--ERGGLTD | 910 |
| WP_002279859 | 842 | IPQAFIKDNSIDNRVLTSSKENRG-KSDD--VP S--KDVVRKMKS-YWSKLLSAKLITQRKFDNLTKG--ERGGLTD | 910 |
| WP_002280230 | 842 | IPQAFIKDNSIDNRVLTSSKENRG-KSDD--VP S--KDVVRKMKS-YWSKLLSAKLITQRKFDNLTKA--ERGGLTD | 910 |
| WP_002281696 | 842 | IPQAFIKDNSIDNRVLTSSKENRG-KSDD--VP S--KNVVRKMKS-YWSKLLSAKLITQRKFDNLTKA--ERGGLTD | 910 |
| WP_002282247 | 847 | IPQAFIKDNSIDNRVLTSSKANRG-KSDD--VP S--EDVVNRMRP-FWNKLLSSGLISQRKYNNLTKK--E---LTL | 912 |
| WP_002282906 | 842 | IPQAFIKDNSIDNRVLTSSKENRG-KSDD--VP S--KDVVRKMKS-YWSKLLSAKLITORKFDNLTKA--ERGGLTD | 910 |
| WP_002283846 | 842 | IPQAFIKDNSIDNRVLTSSKENRG-KSDD--VP S--KNVVRKMKS-YWSKLLSAKLITQRKFDNLTKA--ERGGLTD | 910 |
| WP_002287255 | 842 | IPQAFIKDNSIDNRVLTSSKENRG-KSDD--VP S--KNVVRKMKS-YWSKLLSAKLITQRKFDNLTKA--ERGGLTD | 910 |
| WP_002288990 | 842 | IPQAFIKDNSIDNRVLTSSKENRG-KSDD--VP S--KDVVRKMKS-YWSKLLSAKLITQRKFDNLTKA--ERGGLTD | 910 |
| WP_002289641 | 842 | IPQAFIKDNSIDNRVLTSSKENRG-KSDD--VP S--KDVVRKMKS-YWSKLLSAKLITORKFDNLTKA--ERGGLTD | 910 |
| WP_002290427 | 842 | IPQAFIKDNSIDNRVLTSSKENRG-KSDD--VP S--KDVVRKMKS-YWSKLLSAKLITORKFDNLTKG--ERGGLTD | 910 |
| WP_002295753 | 842 | IPQAFIKDNSIDNRVLTSSKENRG-KSDD--VP S--KDVVRKMKS-YWSKLLSAKLITQRKFDNLTKA--ERGGLTD | 910 |
| WP_002296423 | 842 | IPQAFIKDNSIDNRVLTSSKENRG-KSDD--VP S--KNVVRKMKS-YWSKLLSAKLITORKFDNLTKA--ERGGLTD | 910 |
| WP_002304487 | 856 | IPQAFIKDNSIDNRVLTRSDKNRG-KSDD--VP S--EEVVHKMKP-FWSKLLSAKLITORKFDNLTKA--ERGGLTD | 924 |
| WP_002305844 | 842 | IPQAFIKDNSIDNRVLTSSKENRG-KSDD--VP S--KDVVRKMKS-YWSKLLSAKLITQRKFDNLTKA--ERGGLTD | 910 |
| WP_002307203 | 842 | IPQAFIKDNSIDNRVLTSSKENRG-KSDD--VP S--KDVVRKMKS-YWSKLLSAKLITQRKFDNLTKA--ERGGLTD | 910 |
| WP_002310390 | 842 | IPQAFIKDNSIDNRVLTSSKENRG-KSDD--VP S--KDVVRKMKS-YWSKLLSAKLITORKFDNLTKG--ERGGLTD | 910 |
| WP_002352408 | 842 | IPQAFIKDNSIDNRVLTSSKENRG-KSDD--VP S--KDVVRKMKS-YWSKLLSAKLITQRKFDNLTKA--ERGGLTD | 910 |
| WP_012997688 | 842 | IPQAFIKDNSIDNRVLTSSKENRG-KSDD--VP S--KNVVRKMKS-YWSKLLSAKLITQRKFDNLTKA--ERGGLTD | 910 |
| WP_014677909 | 842 | IPQAFIKDNSIDNRVLTSSKENRG-KSDD--VP S--KDVVRKMKS-YWSKLLSAKLITORKFDNLTKA--ERGGLTD | 910 |
| WP_019312892 | 842 | IPQAFIKDNSIDNRVLTSSKENRG-KSDD--VP S--KNVVRKMKS-YWSKLLSAKLITQRKFDNLTKA--ERGGLTD | 910 |
| WP_019313659 | 842 | IPQAFIKDNSIDNRVLTSSKENRG-KSDD--VP S--KDVVRKMKS-YWSKLLSAKLITORKFDNLTKA--ERGGLTD | 910 |
| WP_019314093 | 842 | IPQAFIKDNSIDNRVLTSSKENRG-KSDD--VP S--KDVVRKMKS-YWSKLLSAKLITORKFDNLTKA--ERGGLTD | 910 |
| WP_019315370 | 842 | IPQAFIKDNSIDNRVLTSSKENRG-KSDD--VP S--KDVVRKMKP-YWSKLLSAKLITQRKFDNLTKA--ERGGLTD | 910 |
| WP_019803776 | 842 | IPQAFIKDNSIDNRVLTSSKENRG-KSDD--VP S--KDVVRKMKS-YWSKLLSAKLITORKFDNLTKA--ERGGLTD | 910 |
| WP_019805234 | 842 | IPQAFIKDNSIDNRVLTSSKENRG-KSDD--VP S--KDVVRKMKS-YWSKLLSAKLITQRKFDNLTKG--RGGLTD | 910 |
| WP_024783594 | 842 | IPQAFIKDNSIDNRVLTSSKENRG-KSDD--VP S--KDVVRKMKS-YWSKLLSAKLITQRKFDNLTKA--ERGGLTD | 910 |
| WP_024784288 | 847 | IPQAFIKDNSIDNRVLTSSKANRG-KSDD--VP S--EDVVNRMRP-FWNKLLSSGLISQRKYNNLIKK--E---LTL | 912 |
| WP_024784666 | 842 | IPQAFIKDNSIDNRVLTSSKENRG-KSDD--VP S--KNVVRKMKS-YWSKLLSAKLITQRKFDNLTKA--ERGGLTD | 910 |
| WP_024784894 | 842 | IPQAFIKDNSIDNRVLTSSKENRG-KSDD--VP S--KDVVRKMKS-YWSKLLSAKLITQRKFDNLTKA--ERGGLTD | 910 |
| WP_024786433 | 847 | IPQAFIKDNSIDNRVLTSSKANRG-KSDD--VP S--EDVVNRMRP-FWNKLLSSGLISQRKYNNLTKK--E---LTL | 912 |
| WP_049473442 | 842 | IPQAFIKDNSIDNRVLTSSKENRG-KSDD--VP S--KDVVRKMKP-YWSKLLSAKLITORKFDNLTKA--ERGGLTD | 910 |
| WP_049474547 | 842 | IPQAFIKDNSIDNRVLTSSKENRG-KSDD--VP S--KDVVRKMKS-YWSKLLSAKLITORKFDNLTKA--ERGGLTD | 910 |
| EMC03581 | 835 | IPQAFIKDNSIDNRVLTSSKENRG-KSDD--VP S--KNVVRKMKS-YWSKLLSAKLITORKFDNLTKA--ERGGLTD | 903 |
| WP_000428612 | 847 | VPQAFIKDDSLDNRVLTSLKDNRG-KSDN--VP S--LEVVEKMKT-FWQQLLDSKLISYRKENNLTKA--ERGGLDE | 915 |
| WP_000428613 | 845 | VPQAFIKDDSLDNRVLTSLKDNRG-KSDN--VP S--IEVVQKRKA-FWQQLLDSKLISERKENNLTKA--ERGGLDE | 913 |
| WP_049523028 | 840 | IPQAFIKDDSLDNRVLTSSKDNRG-KSDN--VP S--LEIVEKMKG-FWQQLLDSKLISERKENNLTKA--ERGGLDE | 908 |
| WP_003107102 | 811 | IPQSFIKDNSIDNIVLTSQESNRG-KSDN--VP Y--IAIVNKMKS-YWQHQLKSGAISQRKFDNLTKA--ERGGLSE | 879 |
| WP_054279288 | 843 | IPRSFIKDDSIDNKVLTRSEHNRG-KTDN--VP S--IEVVKRMKP-YWQKLLDTKVISQRKFDNLTKA--ERGGLQE | 911 |
| WP_049531101 | 845 | IPQAFIKDDSLDNRVLTSSKDNRG-KSDN--VP S--LEVVQKRKA-FWQQLLESKLISERKENNLTKA--ERGGLNE | 913 |
| WP_049538452 | 845 | IPQAFIKDDSLDNRVLTSSKENRG-KSDN--VP C--LEVVDKMKV-FWQQLLDFKLISYRKENNLTKA--ERGGLDE | 913 |
| WP_049549711 | 845 | IPQAFIKDDSLDNRVLTSSKDNRG-KSDN--VP S--LEVVOKRKA-FWQQLLDSKLISERKENNLTKAerERDGLNE | 915 |
| WP_007896501 | 847 | IPQSFIKDNSIDNLVLTTQKANRG-KSDN--VP S--IEVVRDMKDrVWRRQLANGAISROKFDHLTKA--ERGGLAD | 916 |
| EFR44625 | 799 | IPQSFIKDNSIDNLVLTTQKANRG-KSDN--VP S--IEVVRDMKDrVWRRQLANGAISRQKFDHLTKA--ERGGLAD | 868 |
| WP_002897477 | 844 | IPQAFIKDDSIDNRVLTSSKDNRG-KSDN--VP S--LEVVOKRKA-FWQQLLDSKLISERKENNLTKA--ERGGLDE | 912 |
| WP_002906454 | 844 | IPQAFIKDDSLDNRVLTSSKDNRG-KSDN--VP S--IEVVQKRKA-FWQQLLDSKLISERKENNLTKA--KRGGLDE | 912 |
| WP_009729476 | 845 | IPQAFIKDDSLDNRVLTSSKDNRG-KSDN--VP S--LEVVDKMKV-FWQQLLDSKLISYRKENNLTKA--ERGGLNE | 913 |
| CQR24647 | 844 | IPQSFIKDNSLDNRVLINSKSNRG-KSDN--VP S--NEVVKRMKG-FWLKOLDAKLISQRKFDNLTKA--ERGGLSA | 912 |
| WP_000066813 | 847 | IPQAFIKDDSLDNRVLTSSKDNRG-KSDN--VP S--LEVVEKMKA-FWQQLLDSKLISERKENNLTKAerERGGLNE | 917 |
| WP_009754323 | 845 | IPQAFIKDDSLDNRVLTSSKDNRG-KSDN--VP S--LEVVKKRKA-FWQQLLDSKLISERKENNLTKA--ERGGLDE | 913 |
| WP_044674937 | 844 | IPQAFIKDDSLDNKVLTKSAKNRG-KSDD--VP S--LEIVHKKKN-FWKOLLDSQLISQRKFDNLTKA--ERGGLTN | 912 |
| WP_044676715 | 846 | IPQAFIKDDSLDNKVLTKSAKNRG-KSDD--VP S--LEIVHKKKN-FWKOLLDSQLISQRKFDNLTKA--ERGGLIN | 914 |
| WP_044680361 | 846 | IPQAFIKDDSLDNKVLTKSAKNRG-KSDD--VP S--LEIVHKKKN-FWKQLLDSQLISQRKFDNLTKA--ERGGLIN | 914 |
| WP_044681799 | 844 | IPQAFIKDDSLDNKVLTKSAKNRG-KSDD--VP S--LEIVHKKKN-FWKQLLDSQLISQRKFDNLTKA--ERGGLIN | 912 |
| WP_049533112 | 841 | IPQAFIKDDSFDNRVLTSSSENRG-KSDN--VP S--IEVVRARKA-DWMRLRKAGLISQRKFDNLTKA--ERGGLTE | 909 |
| WP_029090905 | 824 | LPQSYIKDNSIENLALVKKVENQR-KKDS11LN S---SIINQNYS-RWEQLKNAGLIGEKKERNLTRTK-----ITD | 890 |
| WP_006506696 | 850 | VPQSLVKDDSFDNRVLVVPSENQR-KLDD1vVP ---FDIRDKMYR-FWKLLFDHELISPKKFYSLIKTe-----YTE | 916 |
| AIT42264 | 842 | VPQSFLKDDSIDNKVLTRSDKNRG-KSDN--VP S--EEVVKKMKN-YWROLLNAKLITQRKFDNLTKA--ERGGLSE | 910 |
| WP_034440723 | 849 | IPRSFITDNSFDNLVLTSSTVNRG-KLDN--VP Sp--DIVRQQKG-FWKOLLRAGLMSQRKENNLTKGK-----LTD | 914 |
| AKQ21048 | 842 | VPQSFLKDDSIDNKVLTRSDKNRG-KSDN--VP S--EEVVKKMKN-YWROLLNAKLITORKFDNLTKA--ERGGLSE | 910 |
| WP_004636532 | 846 | IPQSFTTDNSIDNKVLVSRTKNQGnKSDD--VP S--INIVHKMKP-FWRQLHKAGLISDRKFKNLTKA--EHGGLTE | 915 |
| WP_002364836 | 853 | IPQSFMKDDSLDNLVLVGSTENRG-KSDD--VP S--KEVVKDMKA-YWEKLYAAGLISQRKFORLTKG--EQGGLTL | 921 |
| WP_016631044 | 804 | IPQSFMKDDSLDNLVLVGSTENRG-KSDD--VP S--KEVVKDMKA-YWEKLYAAGLISQRKFORLTKG--EQGGLTL | 872 |
| EMS75795 | 589 | IPRSFIVDNSIDNKVLVSSKENRL-KMDD--VP D--QKVVIRMRR-YWEKLLRANLISERKFAYLTKLe-----LTP | 654 |
| WP_002373311 | 853 | IPQSFMKDDSLDNLVLVGSTENRG-KSDD--VP S--KKVVKKMKA-YWEKLYAAGLISQRKFORLTKG--EQGGLTL | 921 |
| WP_002378009 | 853 | IPQSFMKDDSLDNLVLVGSTENRG-KSDD--VP S--KEVVKDMKA-YWEKLYAAGLISQRKFORLTKG--EQGGLTL | 921 |
| WP_002407324 | 853 | IPQSFMKDDSLDNLVLVGSTENRG-KSDD--VP S--KEVVKDMKA-YWEKLYAAGLISQRKFORLTKG--EQGGLTL | 921 |
| WP_002413717 | 853 | IPQSFMKDDSLDNLVLVGSTENRG-KSDD--VP S--KEVVKDMKA-YWEKLYAAGLISQRKFORLTKG--EQGGLTL | 921 |
| WP_010775580 | 855 | IPQSFMKDDSLDNLVLVGSTENRG-KSDD--VP S--KEVVKKMKA-YWEKLYAAGLISQRKFORLTKG--EQGGLTL | 923 |
| WP_010818269 | 853 | IPQSFMKDDSLDNLVLVGSTENRG-KSDD--VP S--KEVVKDMKA-YWEKLYAAGLISQRKFQRLTKG--EQGGLTL | 921 |
| WP_010824395 | 853 | IPQSFMKDDSLDNLVLVGSTENRG-KSDD--VP S--KEVVKDMKA-YWEKLYAAGLISQRKFORLTKG--EQGGLTL | 921 |
| WP_016622645 | 853 | IPQSFMKDDSLDNLVLVGSTENRG-KSDD--VP S--KEVVKDMKA-YWEKLYAAGLISQRKFORLTKG--EQGGLTL | 921 |
| WP_033624816 | 853 | IPQSFMKDDSLDNLVLVGSTENRG-KSDD--VP S--KEVVKKMKA-YWEKLYAAGLISQRKFORLTKG--EQGGLTL | 921 |
| WP_033625576 | 853 | IPQSFMKDDSLDNLVLVGSTENRG-KSDD--VP S--KEVVKKMKA-YWEKLYAAGLISQRKFORLTKG--EQGGLTL | 921 |
| WP_033789179 | 853 | IPQSFMKDDSLDNLVLVGSTENRG-KSDD--VP S--KEVVKKMKA-YWEKLYAAGLISQRKFORLTKG--EQGGLTL | 921 |
| WP_002310644 | 853 | IPRSFTTDNSIDNKVLVSSKENRL-KKDD--VP S--EKVVKKMRS-FWYDLYSSKLISKRKLDNLTKIk-----LTE | 918 |
| WP_002310644 | 853 | IPRSFTTDNSIDNKVLVSSKENRL-KKDD--VP S--EKVVKKMRS-FWYDLYSSKLISKRKLDNLTKIk-----LTE | 918 |
| WP_002312694 | 854 | IPRSFTTDNSIDNKVLVSSKENRL-KKDD--VP S--EKVVKKMRS-FWYDLYSSKLISKRKLDNLTKIk-----LTE | 919 |
| WP_002314015 | 854 | IPRSFTTDNSIDNKVLVSSKENRL-KKDD--VP S--EKVVKKMRS-FWYDLYSSKLISKRKLDNLTKIk-----LTE | 919 |
| WP_002320716 | 854 | IPRSFTTDNSIDNKVLVSSKENRL-KKDD--VP S--EKVVKKMRS-FWYDLYSSKLISKRKLDNLTKIk-----LTE | 919 |
| WP_002330729 | 853 | IPRSFTTDNSIDNKVLVSSKENRL-KKDD--VP S--EKVVKKMRS-FWYDLYSSKLISKRKLDNLTKIk-----LTE | 918 |
| WP_002335161 | 854 | IPRSFTTDNSIDNKVLVSSKENRL-KKDD--VP S--EKVVKKMRS-FWYDLYSSKLISKRKLDNLTKIk-----LTE | 919 |
| WP_002345439 | 854 | IPRSFTTDNSIDNKVLVSSKENRL-KKDD--VP S--EKVVKKMRS-FWYDLYSSKLISKRKLDNLTKIk-----LTE | 919 |
| WP_034867970 | 845 | IPRSFIVDNSIDNKVLVASKQNQK-KRDD--VP K--KQIVNEQRI-FWNOLKEAKLISTKKYAYLTKIe-----LTP | 910 |
| WP_047937432 | 854 | IPRSFTTDNSIDNKVLVSSKENRL-KKDD--VP S--EKVVKKMRS-FWYDLYSSKLISKRKLDNLTKIk-----LTE | 919 |
| WP_010720994 | 845 | IPRSFIVDNSIDNKVLVASKQNQK-KKDD--VP K--KQIVNEQRI-FWNOLKEAKLISPKKYAYLTKIe-----LTP | 910 |
| WP_010737004 | 845 | IPRSFIVDNSIDNKVLVSSKENRL-KKDD--VP K--KQIVNEQRI-FWNQLKEAKLISPKKYAYLTKIe-----LTP | 910 |
| WP_034700478 | 845 | IPRSFIVDNSIDNKVLVSSKENRL-KKDD--VP N--KQIVNEQRI-FWNQLKEAKLISPKKYAYLTKIe-----LTP | 910 |
| WP_007209003 | 846 | IPQSFLTDNSIDNRVLTTSKSNRG-KSDN--VP S--EEVVRKMDR-FWRKLLNAKLISERKYTNLTKKe-----LTE | 911 |
| WP_023519017 | 839 | IPRSFIVDNSLDNKVLVSSKVNRG-KLDN--AP D--PLVVKRMRS-HWEKLHQAKLISDKKLANLTKQn-----LTE | 904 |
| WP_010770040 | 846 | VPQSFTTDNSLDNRVLVSSKENRG-KKDD--VP S--KEVVQKNIT-LWETLKNSNLISQKKYDNLTKG--LRGGLTE | 914 |
| WP_048604708 | 843 | IPQSFIVDNSLDNRVLVSSSKNRG-KLDD--VP S--KEVVKKMRA-FWESLYRSGLISKKKFDNLVKA--ESGGLSE | 911 |
| WP_010750235 | 848 | IPRSFIVDHSLDNKVLVSSKENRL-KKDD--VP D--SKVVKRMKA-YWEKLLRANLISERKFSYLTKLe-----LTD | 913 |
| AII16583 | 881 | VPQSFLKDDSIDNKVLTRSDKNRG-KSDN--VP S--EEVVKKMKN-YWRQLLNAKLITQRKEDNLTKA--ERGGLSE | 949 |
| WP_029073316 | 861 | VPQSLLKDDSIDNKVLVLSSENQR-KLDDlvlP ---EMIRNKMFG-FWNKLYENKIISPKKFYSLIKSe-----YSD | 927 |
| WP_031589969 | 861 | VPQSLLKDDSIDNKVLVLSSENQR-KLDDlvlP ---SSIRNKMYG-FWEKLENNKIISPKKFYSLIKTe-----FNE | 927 |
| KDA45870 | 834 | IPQSFLKDDSIENKVLTIKKENVR-KTNG--LP S--EAVIQKMGS-FWKKLLDAGAMTNKKYDNLRRN1--HGGLNE | 902 |
| WP_039099354 | 857 | LPQSFIKDNSLDNRVLVSQRMNRS-KADQ--VP S--VELGQKMQI-QWEQMLRAGLITKKKYDNLTLNp-------- | 923 |
| AKP02966 | 859 | LPRTYIPDDSLENKALVLAKENQR-KADDllLN S---NVIDKNLE-RWTYMLNNNMMGLKKFKNLTRRv-----ITD | 925 |
| WP_010991369 | 845 | VPQSFITDNSIDNLVLTSSAGNRE-KGDD--VP P--LEIVRKRKV-FWEKLYQGNLMSKRKFDYLTKA--ERGGLTE | 913 |
| WP_033838504 | 845 | VPQSFITDNSIDNLVLTSSAGNRE-KGDD--VP P--LEIVRKRKV-FWEKLYQGNLMSKRKFDYLTKA--ERGGLTE | 913 |
| EHN60060 | 848 | VPQSFITDNSIDNLVLTSSAGNRE-KGDD--VP P--LEIVRKRKV-FWEKLYQGNLMSKRKFDYLTKA--ERGGLTE | 916 |
| EFR89594 | 614 | VPQSFITDNSIDNLVLTSSAGNRE-KGDD--VP P--LEIVQKRKV-FWEKLYQGNLMSKRKFDYLTKA--ERGGLTE | 682 |
| WP_038409211 | 845 | IPQSFITDNSIDNRVLTSSTANRE-KGDN--VP L--LEVVRKRKA-FWEKLYQAKLMSKRKFDYLTKA--ERGGLTE | 913 |
| EFR95520 | 464 | IPQSFITDNSIDNRVLTSSTANRE-KGDN--VP L--LEVVRKRKA-FWEKLYQAKLMSKRKEDYLTKA--ERGGLTE | 532 |
| WP_003723650 | 845 | VPQSFITDNSIDNLVLTSSAGNRE-KGGD--VP P--LEIVRKRKV-FWEKLYQGNLMSKRKFDYLTKA--ERGGLTE | 913 |
| WP_003727705 | 845 | VPQSFITDNSIDNLVLTSSAGNRE-KGGD--VP P--LEIVRKRKV-FWEKLYQGNLMSKRKFDYLTKA--ERGGLTE | 913 |
| WP_003730785 | 845 | VPQSFITDNSIDNLVLTSSAGNRE-KGGD--VP P--LEIVRKRKV-FWEKLYQGNLMSKRKFDYLTKA--ERGGLTE | 913 |
| WP_003733029 | 845 | VPQSFITDNSVDNLVLTSSAGNRE-KGGN--VP P--LEIVQKRKI-FWEKLYQGNLMSKRKFDYLTKA--ERGGLTE | 913 |
| WP_003739838 | 845 | VPQSFITDNSIDNLVLTSSAGNRE-KGDD--VP P--LEIVRKRKV-FWEKLFQGNLMSKRKFDYLTKA--ERGGLTE | 913 |
| WP_014601172 | 845 | VPQSFITDNSIDNLVLTSSAGNRE-KGGD--VP P--LEIVRKRKV-FWEKLYQGNLMSKRKFDYLTKA--ERGGLTD | 913 |
| WP_023548323 | 845 | VPQSFITDNSIDNLVLTSSAGNRE-KGDN--VP P--LEIVQKRKI-FWEKLYQGNLMSKRKFDYLTKA--ERGGLTE | 913 |
| WP_031665337 | 845 | VPQSFITDNSIDNLVLTSSAGNRE-KGGD--VP P--LEIVRKRKV-FWEKLYQGNLMSKRKFDYLTKA--ERGGLTE | 913 |
| WP_031669209 | 845 | VPQSFITDNSVDNLVLTSSAGNRE-KGDN--VP P--LEIVOKRKI-FWEKLYQGNLMSKRKFDYLTKA--ERGGLTE | 913 |
| WP_033920898 | 845 | VPQSFITDNSIDNLVLTSSAGNRE-KGDN--VP P--LEIVOKRKI-FWEKLYQGNLMSKRKEDYLTKA--ERGGLTE | 913 |
| AKI42028 | 848 | VPQSFITDNSIDNLVLTSSAGNRE-KGGD--VP P--LEIVRKRKV-FWEKLYQGNLMSKRKFDYLTKA--ERGGLTD | 916 |
| AKI50529 | 848 | VPQSFITDNSIDNLVLTSSAGNRE-KGDN--VP P--LEIVQKRKI-FWEKLYQGNLMSKRKFDYLTKA--ERGGLTE | 916 |
| EFR83390 | 293 | VPQSFITDNSIDNLVLTSSAGNRE-KGDD--VP P--LEIVRKRKV-FWEKLYQGNLMSKRKFDYLTKA--ERGGLTE | 361 |
| WP_046323366 | 845 | VPQSFITDNSIDNRVLASSAANRE-KGDN--VP S--LEVVRKRKV-YWEKLYQAKLMSKRKEDYLTKA--ERGGLTE | 913 |
| AKE81011 | 858 | VPQSFLKDDSIDNKVLTRSDKNRG-KSDN--VP S--EEVVKKMKN-YWROLLNAKLITORKFDNLTKA--ERGGLSE | 926 |
| CUO82355 | 854 | VPQSLVKDDSFDNRVLVLPSENQR-KLDD1vVP ---FDIRDKMYR-FWKLLFDHELISPKKFYSLIKTe-----YTE | 920 |
| WP_033162887 | 856 | LPQSLIKDDSFDNRVLVLPEENQW-KLDSetVP ---FEIRNKMIG-FWQMLHENGLMSNKKFFSLIRTd-----FSD | 922 |
| AGZ01981 | 875 | VPQSFLKDDSIDNKVLTRSDKNRG-KSDN--VP S--EEVVKKMKN-YWROLLNAKLITORKFDNLTKA--ERGGLSE | 943 |
| AKA60242 | 842 | VPQSFLKDDSIDNKVLTRSDKNRG-KSDN--VP S--EEVVKKMKN-YWRQLLNAKLITORKFDNLTKA--ERGGLSE | 910 |
| AKS40380 | 842 | VPQSFLKDDSIDNKVLTRSDKNRG-KSDN--VP S--EEVVKKMKN-YWRQLLNAKLITQRKFDNLTKA--ERGGLSE | 910 |
| 4UN5_B | 846 | VPQSFLKDDSIDNKVLTRSDKNRG-KSDN--VP S--EEVVKKMKN-YWROLLNAKLITORKFDNLTKA--ERGGLSE | 914 |
| WP_010922251 | 911 | [chemical structure] | 981 |
| WP_039695303 | 921 | AD KAGFIKRQLVETROITKHVAQILDARFNTEHDENDKVIR--DVKVITLKSNLVSQFRKDF EFYKVREINDY | 991 |
| WP_045635197 | 913 | RD KVGFIKRQLVETRQITKHVAQILDARYNTEVNEKDKKNR--TVKIITLKSNLVSNFRKEF RLYKVREINDY | 983 |
| 5AXW_A | 633 | RD QKDFINRNLVDTRYATRGLMNLLRSYFR---------VNn1DVKVKSINGGFTSFLRRKW KFKKERNKGYK | 702 |
| WP_009880683 | 595 | LD KAGFIKRQLVETROITKHVAQILDSRMNTKYDENDKLIR--EVRVITLKSKLVSDFRKDF QFYKVREINNY | 665 |
| WP_010922251 | 911 | LD KAGFIKRQLVETROITKHVAQILDSRMNTKYDENDKLIR--EVKVITLKSKLVSDFRKDF QFYKVREINNY | 981 |
| WP_011054416 | 911 | LD KVGFIKRQLVETROITKHVAQILDSRMNTKYDENDKLIR--EVRVITLKSKLVSDFRKDF QFYKVREINNY | 981 |
| WP_011284745 | 911 | LD KAGFIKRQLVETROITKHVAQILDSRMNTKYDENDKLIR--EVKVITLKSKLVSDFRKDF QFYKVREINNY | 981 |
| WP_011285506 | 911 | LD KAGFIKRQLVETROITKHVAQILDSRMNTKYDENDKLIR--EVKVITLKSKLVSDFRKDF QFYKVREINNY | 981 |
| WP_011527619 | 911 | LD KAGFIKRQLVETRQITKHVAQILDSRMNTKYDENDKLIR--EVKVITLKSKLVSDFRKDF QFYKVREINNY | 981 |
| WP_012560673 | 911 | LD KAGFIKRQLVETRQITKHVAQILDSRMNTKYDENDKLIR--EVRVITLKSKLVSDFRKDF QFYKVREINNY | 981 |
| WP_014407541 | 910 | LD KAGFIKRQLVETRQITKHVAQILDSRMNTKYDENDKLIR--EVKVITLKSKLVSDFRKDF QFYKVREINNY | 980 |
| WP_020905136 | 911 | LD KAGFIKRQLVETROITKHVAQILDSRMNTKYDENDKLIR--EVKVITLKSKLVSDFRKDF QFYKVREINNY | 981 |
| WP_023080005 | 910 | LD KAGFIKRQLVETRQITKHVAQILDSRMNTKYDENDKLIR--EVKVITLKSKLVSDFRKDF QFYKVREINNY | 980 |
| WP_023610282 | 910 | LD KAGFIKRQLVETROITKHVAQILDSRMNTKYDENDKLIR--EVKVITLKSKLVSDFRKDF QFYKVREINNY | 980 |
| WP_030125963 | 911 | LD KAGFIKRQLVETROITKHVAQILDSRMNTKYDENDKLIR--EVKVITLKSKLVSDFRKDF QFYKVREINNY | 981 |
| WP_030126706 | 911 | LD KAGFIKRQLVETROITKHVAQILDSRMNTKYDENDKLIR--EVKVITLKSKLVSDFRKDF QFYKVREINNY | 981 |
| WP_031488318 | 911 | LD KAGFIKRQLVETRQITKHVAQILDSRMNTKYDENDKLIR--EVKVITLKSKLVSDERKDF QFYKVREINNY | 981 |
| WP_032460140 | 911 | LD KAGFIKRQLVETRQITKHVAQILDSRMNTKYDENDKLIR--EVRVITLKSKLVSDFRKDF QFYKVREINNY | 981 |
| WP_032461047 | 911 | LD KAGFIKRQLVETROITKHVAQILDSRMNTKYDENDKLIR--EVRVITLKSKLVSDFRKDF QFYKVREINNY | 981 |
| WP_032462016 | 911 | LD KAGFIKRQLVETROITKHVAQILDSRMNTKYDENDKLIR--EVKVITLKSKLVSDERKDF QFYKVREINNY | 981 |
| WP_032462936 | 911 | LD KAGFIKRQLVETROITKHVAQILDSRMNTKYDENDKLIR--EVRVITLKSKLVSDERKDE QFYKVREINNY | 981 |
| WP_032464890 | 911 | LD KAGFIKRQLVETROITKHVAQILDSRMNTKYDENDKLIR--EVKVITLKSKLVSDFRKDF QFYKVREINNY | 981 |
| WP_033888930 | 736 | LD KAGFIKRQLVETROITKHVAQILDSRMNTKYDENDKLIR--EVKVITLKSKLVSDFRKDF QFYKVREINNY | 806 |
| WP_038431314 | 911 | LD KAGFIKRQLVETROITKHVAQILDSRMNTKYDENDKLIR--EVKVITLKSKLVSDERKDF QFYKVREINNY | 981 |
| WP_038432938 | 910 | LD KAGFIKRQLVETROITKHVAQILDSRMNTKYDENDKLIR--EVKVITLKSKLVSDFRKDF QFYKVREINNY | 980 |
| WP_038434062 | 911 | LD KAGFIKRQLVETROITKHVAQILDSRMNTKYDENDKLIR--EVKVITLKSKLVSDERKDF QFYKVREINNY | 981 |
| BAQ51233 | 822 | LD KAGFIKRQLVETROITKHVAQILDSRMNTKYDENDKLIR--EVKVITLKSKLVSDFRKDF QFYKVREINNY | 892 |
| KGE60162 | 86 | LD KVGFIKRQLVETROITKHVAQILDSRMNTKYDENDKLIR--EVRVITLKSKLVSDFRKDF QFYKVREINNY | 156 |
| KGE60856 | | -- ------------------------------------------------------------ ----------- | |
| WP_002989955 | 911 | LD KAGFIKRQLVETROITKHVAQILDSRMNTKYDENDKLIR--EVKVITLKSKLVSDERKDF QFYKVREINNY | 981 |
| WP_003030002 | 910 | ED KAGFIKRQLVETRQITKHVAQILDERENTEFDGNKRRIR--NVKIITLKSNLVSNERKEF ELYKVREINDY | 980 |
| WP_003065552 | 921 | AD KAGFIKRQLVETROITKHVAQILDARFNTESDENDKVIR--DVKVITLKSNLVSQFRKDF EFYKVREINDY | 991 |
| WP_001040076 | 916 | DD KARFIQRQLVETRQITKHVARILDERFNNELDSKGRRIR--KVKIVTLKSNLVSNERKEF VFYKIREVNNY | 986 |
| WP_001040078 | 916 | DD KARFIQROLVETROITKHVARILDERFNNELDSKGRRIR--KVKIVTLKSNLVSNERKEF GFYKIREVNDY | 986 |
| WP_001040080 | 916 | DD KARFIQRQLVETRQITKHVARILDERFNNELDSKGRRIR--KVKIVTLKSNLVSNERKEF GFYKIREVNNY | 986 |
| WP_001040081 | 916 | DD KARFIQRQLVETRQITKHVARILDERFNNELDSKGRRIR--KVKIVTLKSNLVSNERKEF GFYKIREVNNY | 986 |
| WP_001040083 | 916 | DD KARFIQROLVETROITKHVARILDERFNNELDSKGRRIR--KVKIVTLKSNLVSNERKEF GFYKIREVNNY | 986 |
| WP_001040085 | 916 | DD KARFIQROLVETRQITKHVARILDERFNNELDSKGRRIR--KVKIVTLKSNLVSNERKEF GFYKIREVNNY | 986 |
| WP_001040087 | 916 | DD KARFIQRQLVETRQITKHVARILDERFNNELDSKGRRIR--KVKIVTLKSNLVSNERKEF GFYKIREVNNY | 986 |
| WP_001040088 | 916 | DD KARFIQROLVETROITKHVARILDERFNNELDSKGRRIR--KVKIVTLKSNLVSNFRKEF GFYKIREVNNY | 986 |
| WP_001040089 | 916 | DD KARFIQROLVETRQITKHVARILDERFNNELDSKGRRIR--KVKIVTLKSNLVSNERKEF GFYKIREVNNY | 986 |
| WP_001040090 | 916 | DD KARFIQRQLVETRQITKHVARILDERFNNELDSKGRRIR--KVKIVTLKSNLVSNFRKEF GFYKIREVNNY | 986 |
| WP_001040091 | 916 | DD KARFIQRQLVETROITKHVARILDERFNNELDSKGRRIR--KVKIVTLKSNLVSNERKEF GFYKIREVNNY | 986 |
| WP_001040092 | 916 | DD KAGFIQRQLVETROITKHVARILDERFNNKVDDNNKPIR--KVKIVTLKSNLVSNFRKEF GFYKIREVNNY | 986 |
| WP_001040094 | 916 | DD KARFIQROLVETROITKHVARILDERFNNELDSKGRRIR--KVKIVTLKSNLVSNERKEF GFYKIREVNNY | 986 |
| WP_001040095 | 916 | DD KARFIQROLVETRQITKHVARILDERFNNELDSKGRRIR--KVKIVTLKSNLVSNERKEF GFYKIREVNNY | 986 |
| WP_001040096 | 916 | DD KARFIQROLVETROITKHVARILDERFNNELDSKGRRIR--KVKIVTLKSNLVSNERKEF GFYKIREVNNY | 986 |
| WP_001040097 | 916 | DD KARFIQROLVETROITKHVARILDERFNNELDSKGRRIR--KVKIVTLKSNLVSNERKEF GFYKIREVNNY | 986 |
| WP_001040098 | 916 | DD KARFIQROLVETROITKHVARILDERFNNELDSKGRRIR--KVKIVTLKSNLVSNERKEF GFYKIREVNNY | 986 |
| WP_001040099 | 916 | DD KARFIQROLVETROITKHVARILDERFNNELDSKGRRIR--KVKIVTLKSNLVSNERKEF GFYKIREVNNY | 986 |
| WP_001040100 | 916 | DD KARFIQRQLVETRQITKHVARILDERFNNELDSKGRRIR--KVKIVTLKSNLVSNERKEF GFYKIREVNNY | 986 |
| WP_001040104 | 916 | DD KARFIQRQLVETRQITKHVARILDERFNNELDSKGRRIR--KVKIVTLKSNLVSNFRKEF GFYKIREVNNY | 986 |
| WP_001040105 | 916 | DD KARFIQROLVETROITKHVARILDERFNNELDSKGRRIR--KVKIVTLKSNLVSNERKEF GFYKIREVNNY | 986 |
| WP_001040106 | 916 | DD KARFIQROLVETROITKHVARILDERFNNELDSKGRRIR--KVKIVTLKSNLVSNFRKEF GFYKIREVNDY | 986 |
| WP_001040107 | 916 | DD KARFIQROLVETROITKHVARILDERFNNELDSKGRRIR--KVKIVTLKSNLVSNFRKEF GFYKIREVNDY | 986 |
| WP_001040108 | 916 | DD KARFIQROLVETRQITKHVARILDERFNNELDSKGRRIR--KVKIVTLKSNLVSNERKEF GFYKIREVNDY | 986 |
| WP_001040109 | 916 | DD KARFIQRQLVETROITKHVARILDERFNNELDSKGRRIR--KVKIVTLKSNLVSNERKEF GFYKIREVNDY | 986 |
| WP_001040110 | 916 | DD KARFIQROLVETROITKHVARILDERFNNELDSKGRRIR--KVKIVTLKSNLVSNERKEF GFYKIREVNDY | 986 |
| WP_015058523 | 916 | DD KAGFIQRQLVETROITKHVARILDERFNNKVDDNNKPIR--KVKIVTLKSNLVSNERKEF GFYKIREVNNY | 986 |
| WP_017643650 | 916 | DD KARFIQROLVETROITKHVARILDERFNNELDSKGRRIR--KVKIVTLKSNLVSNERKEF GFYKIREVNNY | 986 |
| WP_017647151 | 916 | DD KARFIQROLVETROITKHVARILDERFNNELDSKGRRIR--KVKIVTLKSNLVSNERKEF GFYKIREVNNY | 986 |
| WP_017648376 | 916 | DD KARFIQRQLVETRQITKHVARILDERFNNELDSKGRRIR--KVKIVTLKSNLVSNERKEF GFYKIREVNNY | 986 |
| WP_017649527 | 916 | DD KARFIQROLVETROITKHVARILDERFNNELDSKGRRIR--KVKIVTLKSNLVSNERKEF GFYKIREVNNY | 986 |
| WP_017771611 | 916 | DD KARFIQRQLVETROITKHVARILDERFNNELDSKGRRIR--KVKIVTLKSNLVSNERKEF GFYKIREVNDY | 986 |
| WP_017771984 | 916 | DD KARFIQRQLVETROITKHVARILDERFNNELDSKGRRIR--KVKIVTLKSNLVSNERKEF GFYKIREVNNY | 986 |
| CFQ25032 | 916 | DD KARFIQRQLVETROITKHVARILDERFNNELDSKGRRIR--KVKIVTLKSNLVSNFRKEF GFYKIREVNNY | 986 |
| CFV16040 | 916 | DD KARFIQRQLVEIRQITKHVARILDERFNNELDSKGRRIR--KVKIVTLKSNLVSNFRKEF GFYKIREVNNY | 986 |
| KLJ37842 | 916 | DD KARFIQRQLVETRQITKHVARILDERFNNELDSKGRRIR--KVKIVTVKSNLVSNERKEF GFYKIREVNNY | 986 |
| KLJ72361 | 916 | DD KARFIQRQLVETRQITKHVARILDELFNNELDSKGRRIR--KVKIVTLKSNLVSNFRKEF GFYKIREVNNY | 986 |
| KLL20707 | 930 | DD KARFIQRQLVETRQITKHVARILDERFNNELDSKGRRIR--KVKIVTLKSNLVSNFRKEF GFYKIREVNNY | 1000 |
| KLL42645 | 916 | DD KARFIQRQLVETROITKHVARILDERFNNELDSKGRRIR--KVKIVTLKSNLVSNERKEF GFYKIREVNDY | 986 |
| WP_047207273 | 916 | DD KARFIQRQLVETROITKHVARILDERFNNELDSKGRRIR--KVKIVTLKSNLVSNERKEF GFYKIREVNNY | 986 |
| WP_047209694 | 916 | DD KARFIQRQLVETROITKHVARILDERFNNELDSKGRRIR--KVKIVTLKSNLVSNFRKEF GFYKIREVNNY | 986 |
| WP_050198062 | 916 | DD KARFIQRQLVETRQITKHVARILDERFNNELDSKGRRIR--KVKIVTLKSNLVSNFRKEF GFYKIREVNNY | 986 |
| WP_050201642 | 916 | DD KARFIQROLVETROITKHVASILDERFNNELDSKGRRIR--KVKIVTLKSNLVSNERKEF GFYKIREVNNY | 986 |
| WP_050204027 | 916 | DD KARFIQRQLVETROITKHVARILDERFNNELDSKGRRIR--KVKIVTLKSNLVSNERKEF GFYKIREVNDY | 986 |
| WP_050881965 | 916 | DD KARFIQRQLVETRQITKHVARILDERFNNELDSKGRRIR--KVKIVILKSNLVSNERKEF GFYKIREVNNY | 986 |
| WP_050886065 | 916 | DD KARFIQROLVETROITKHVARILDERFNNELDSKGRRIR--KVKIVTLKSNLVSNERKEF GFYKIREVNNY | 986 |
| AHN30376 | 916 | DD KAGFIQRQLVETROITKHVARILDERFNNKVDDNNKPIR--KVKIVTLKSNLVSNERKEF GFYKIREVNNY | 986 |
| EAO78426 | 916 | DD KARFIQRQLVETROITKHVARILDERFNNELDSKGRRIR--KVKIVTLKSNLVSNFRKEF GFYKIREVNNY | 986 |
| CCW42055 | 916 | DD KARFIQRQLVETROITKHVARILDERFNNELDSKGRRIR--KVKIVTLKSNLVSNFRKEF GFYKIREVNDY | 986 |
| WP_003041502 | 910 | ND KAGFIKRQLVETROITKHVAQVLDARFNAKHDENKKVIR--DVKIITLKSNLVSQFRKDF KFYKVREINDY | 980 |
| WP_037593752 | 911 | ED KAGFIKRQLVETRQITKHVAQILDERENTEFDGAQRRIR--NVKIITLKSNLVSNERKEF ELYKVREINDY | 981 |
| WP_049516684 | 911 | ED KAGFIKRQLVETRQITKHVAQILDERENTEFDGAQRRIR--NVKIITLKSNLVSNERKEF ELYKVREINDY | 981 |
| GAD46167 | 910 | ED KAGFIKRQLVETRQITKHVAQILDERENTEFDGAQRRIR--NVKIITLKSNLVSNFRKEF ELYKVREINDY | 980 |
| WP_018363470 | 919 | AD KAGFIKRQLVETROITKHVAQILDARFNTERDENDKVIR--DVKVITLKSNLVSQFRKEF KFYKVREINDY | 989 |
| WP_003043819 | 920 | AD KAGFIKRQLVETROITKHVARILDSRMNTKRDKNDKPIR--EVKVITLKSKLVSDFRKDF QLYKVRDINNY | 990 |
| WP_006269658 | 910 | ED KAGFIKRQLVETROITKHVAQILDERFNTEFDGNKRRIR--NVKIITLKSNLVSNFRKEF ELYKVREINDY | 980 |
| WP_048800889 | 910 | ND KAGFIHRQLVETROITKHVAQILDARFNPKRDDNKKVIR--DVKIITLKSNLVSQFRRDF KLYKVREINDY | 980 |
| WP_012767106 | 910 | LD KAGFIKRQLVETROITKHVAQILDSRMNTKYDENDKLIR--EVKVITLKSKLVSDFRKDF QFYKVREINNY | 980 |
| WP_014612333 | 910 | LD KAGFIKRQLVETRQITKHVAQILDSRMNTKYDENDKLIR--EVKVITLKSKLVSDERKDF QFYKVREINNY | 980 |
| WP_015017095 | 910 | LD KAGFIKRQLVETRQITKHVAQILDSRMNTKYDENDKLIR--EVKVITLKSKLVSDERKDE QFYKVREINNY | 980 |
| WP_015057649 | 910 | LD KAGFIKRQLVETRQITKHVAQILDSRMNTKYDENDKLIR--EVKVITLKSKLVSDFRKDF QFYKVREINNY | 980 |
| WP_048327215 | 910 | LD KAGFIKRQLVETRQITKHVAQILDSRMNTKYDENDKLIR--EVKVITLKSKLVSDFRKDF QFYKVREINNY | 980 |
| WP_049519324 | 910 | LD KAGFIKRQLVETROITKHVAQILDSRMNTKYDENDKLIR--EVKVITLKSKLVSDFRKDF QFYKVREINNY | 980 |
| WP_012515931 | 910 | VD KAGFIQROLVETROITKHVAQILDSRENTEFDDHNKRIR--KVHIITLKSKLVSDFRKEF GLYKIRDINHY | 980 |
| WP_021320964 | 910 | VD KAGFIQROLVETROITKHVAQILDSRENTEFDDHNKRIR--KVHIITLKSKLVSDFRKEF GLYKIRDINHY | 980 |
| WP_037581760 | 910 | VD KAGFIQLOLVETROITKHVAQILDSRENTEFDDHNKRIR--KVHIITLKSKLVSDFRKEF GLYKIRDINHY | 980 |
| WP_004232481 | 918 | TD KAGFIKRQLVETROITKHVAQILDARFNTKCDENDKVIR--DVKVITLKSSLVSQFRKEF KFYKVREINDY | 988 |
| WP_009854540 | 919 | AD KAGFIKRQLVETROITKHVAQILDARFNTEHDENDKVIR--DVKVITLKSNLVSQFRKDF EFYKVREINDY | 989 |
| WP_012962174 | 919 | ND KAGFIKRQLVETROITKHVAQILDSRENTERDENDKVIR--NVKVITLKSNLVSQFRKDF KFYKVREINDY | 989 |
| WP_039695303 | 921 | AD KAGFIKRQLVETROITKHVAQILDARFNTEHDENDKVIR--DVKVITLKSNLVSQFRKDF EFYKVREINDY | 991 |
| WP_014334983 | 918 | AD KAGFIKRQLVETROITKHVAQILDARFNTKRDENDKVIR--DVKVITLKSNLVSQFRKEF KFYKVREINDY | 988 |
| WP_003099269 | 911 | FD KAGFIKRQLVETROITKHVAQILDSRFNSNLTEDSKSNR--NVKIITLKSKMVSDERKDF GFYKLREVNDY | 981 |
| AHY15608 | 911 | FD KAGFIKRQLVETROITKHVAQILDSRENSNLTEDSKSNR--NVKIITLKSKMVSDERKDF GFYKLREVNDY | 981 |
| AHY17476 | 911 | FD KAGFIKRQLVETROITKHVAQILDSRENSNLTEDSKSNR--NVKIITLKSKMVSDERKDF GFYKLREVNDY | 981 |
| ESR09100 | | -- ------------------------------------------------------------ ----------- | |
| AGM98575 | 911 | FD KAGFIKRQLVETROITKHVAQILDSRENSNLTEDSKSNR--NVKIITLKSKMVSDERKDF GFYKLREVNDY | 981 |
| ALF27331 | 911 | DD KAGFIKRQLVETROITKHVARILDERENTETDENNKKIR--QVKIVTLKSNLVSNFRKEF ELYKVREINDY | 981 |
| WP_018372492 | 924 | ED KAGFIRRQLVETROITKHVARLLDEKLNRKKNENGEKLR--TTKIITLKSVFASRFRANF DLYKLRELNHY | 994 |
| WP_045618028 | 914 | RD KVGFIKRQLVETRQITKHVAQILDARFNTEVTEKDKKDR--SVKIITLKSNLVSNFRKEF RLYKVREINDY | 984 |
| WP_045635197 | 913 | RD KVGFIKRQLVETROITKHVAQILDARYNTEVNEKDKKNR--TVKIITLKSNLVSNERKEF RLYKVREINDY | 983 |
| WP_002263549 | 911 | DD KAGFIKRQLVETROITKHVARILDERENTETDENNKKIR--QVKIVTLKSNLVSNERKEF ELYKVREINDY | 981 |
| WP_002263887 | 911 | DD KAGFIKRQLVETROITKHVARILDERENTETDENNKKIR--QVKIVTLKSNLVSNFRKEF ELYKVREINDY | 981 |
| WP_002264920 | 911 | DD KAGFIKRQLVETRQITKHVARILDERENTETDENNKKIR--QVKIVILKSNLVSNERKEF ELYKVREINDY | 981 |
| WP_002269043 | 911 | DD KAGFIKRQLVETROITKHVARILDERENTETDENNKKIR--QVKIVILKSNLVSNFRKEF ELYKVREINDY | 981 |
| WP_002269448 | 911 | DD KAGFIKRQLVETROITKHVARILDERFYTETDENNKKIR--QVKIVTLKSNLVSNERKEF ELYKVREINDY | 981 |
| WP_002271977 | 911 | DD KAGFIKRQLVETROITKHVARILDERFYTETDENNKKIR--QVKIVTLKSNLVSNERKEF ELYKVREINDY | 981 |
| WP_002272766 | 911 | DD KAGFIKRQLVETROITKHVARILDERENTETDENNKKIR--QVKIVTLKSNLVSNERKEF ELYKVREINDY | 981 |
| WP_002273241 | 911 | DD KAGFIKRQLVETRQITKHVARILDERFYTETDENNKKIR--QVKIVILKSNLVSNERKEF ELYKVREINDY | 981 |
| WP_002275430 | 911 | DD KAGFIKRQLVETROITKHVARILDERENTETDENNKKIR--QVKIVTLKSNLVSNERKEF ELYKVREINDY | 981 |
| WP_002276448 | 911 | DD KAGFIKROLVETRQITKHVARILDERFYTETDENNKKIR--QVKIVTLKSNLVSNFRKEF ELYKVREINDY | 981 |
| WP_002277050 | 913 | DD KAGFIKRQLVETROITKHVARMLDERENKEFDDNNKRIR--RVKIVTLKSNLVSSFRKEF ELYKVREINDY | 983 |
| WP_002277364 | 911 | DD KAGFIKRQLVETROITKHVARILDERFHTETDENNKKIR--QVKIVTLKSNLVSNERKEF ELYKVREINDY | 981 |
| WP_002279025 | 911 | DD KAGFIKRQLVETROITKHVARILDERENTETDENNKKIR--QVKIVTLKSNLVSNFRKEF ELYKVREINDY | 981 |
| WP_002279859 | 911 | DD KAGFIKRQLVETRQITKHVARILDERENTETDENNKKIR--QVKIVTLKSNLVSNFRKEF ELYKVREINDY | 981 |
| WP_002280230 | 911 | DD KAGFIKRQLVETRQITKHVARILDERFYTETDENNKKIR--QVKIVTLKSNLVSNERKEF ELYKVREINDY | 981 |
| WP_002281696 | 911 | DD KAGFIKRQLVETROITKHVARILDERFHTETDENNKKIR--QVKIVTLKSNLVSNERKEF ELYKVREINDY | 981 |
| WP_002282247 | 913 | DD KAGFIKRQLVETROITKHVARMLDERENKEFDDNNKRIR--RVKIVTLKSNLVSSFRKEF ELYKVREINDY | 983 |
| WP_002282906 | 911 | DD KAGFIKRQLVETROITKHVARILDERENTETDENNKKIR--QVKIVILKSNLVSNERKEF ELYKVREINDY | 981 |
| WP_002283846 | 911 | DD KAGFIKRQLVETRQITKHVARILDERFHTETDENNKKIR--QVKIVTLKSNLVSNERKEF ELYKVREINDY | 981 |
| WP_002287255 | 911 | DD KAGFIKRQLVETROITKHVARILDERFHTETDENNKKIR--QVKIVTLKSNLVSNFRKEF ELYKVREINDY | 981 |
| WP_002288990 | 911 | DD KAGFIKRQLVETROITKHVARILDERENTETDENNKKIR--QVKIVILKSNLVSNFRKEF ELYKVREINDY | 981 |
| WP_002289641 | 911 | DD KAGFIKRQLVETROITKHVARILDERENTETDENNKKIR--QVKIVTLKSNLVSNERKEF ELYKVREINDY | 981 |
| WP_002290427 | 911 | DD KAGFIKRQLVETROITKHVARILDERENTETDENNKKIR--QVKIVTLKSNLVSNERKEF ELYKVREINDY | 981 |
| WP_002295753 | 911 | DD KAGFIKRQLVETRQITKHVARILDERFYTETDENNKKIR--QVKIVTLKSNLVSNERKEF ELYKVREINDY | 981 |
| WP_002296423 | 911 | DD KAGFIKRQLVETROITKHVARILDERFHTETDENNKKIR--QVKIVTLKSNLVSNERKEF ELYKVREINDY | 981 |
| WP_002304487 | 925 | DD KAGFIKRQLVETROITKHVARILDERENTETDENNKKIR--QVKIVTLKSNLVSNERKEF ELYKVREINDY | 995 |
| WP_002305844 | 911 | DD KAGFIKRQLVETROITKHVARILDERFYTETDENNKKIR--QVKIVTLKSNLVSNERKEF ELYKVREINDY | 981 |
| WP_002307203 | 911 | DD KAGFIKRQLVETRQITKHVARILDERFNTETDENNKKIR--QVKIVTLKSNLVSNERKEF ELYKVREINDY | 981 |
| WP_002310390 | 911 | DD KAGFIKHQLVETROITKHVARILDERENTETDENNKKIR--QVKIVTLKSNLVSNFRKEF ELYKVREINDY | 981 |
| WP_002352408 | 911 | DD KAGFIKRQLVETROITKHVARILDERFNTETDENNKKIR--QVKIVTLKSNLVSNERKEF ELYKVREINDY | 981 |
| WP_012997688 | 911 | DD KAGFIKROLVETRQITKHVARILDERFHTETDENNKKIR--QVKIVTLKSNLVSNFRKEF ELYKVREINDY | 981 |
| WP_014677909 | 911 | DD KAGFIKROLVETRQITKHVARILDERFYTETDENNKKIR--QVKIVTLKSNLVSNFRKEF ELYKVREINDY | 981 |
| WP_019312892 | 911 | DD KAGFIKRQLVETROITKHVARILDERFHTETDENNKKIR--QVKIVTLKSNLVSNERKEF ELYKVREINDY | 981 |
| WP_019313659 | 911 | DD KAGFIKROLVETROITKHVARILDERFHTETDENNKKIR--QVKIVTLKSNLVSNERKEF ELYKVREINDY | 981 |
| WP_019314093 | 911 | DD KAGFIKRQLVETRQITKHVARILDERENTETDENNKKIR--QVKIVTLKSNLVSNFRKEF ELYKVREINDY | 981 |
| WP_019315370 | 911 | DD KAGFIKRQLVETROITKHVARILDERFNTETDENNKKIR--QVKIVILKSNLVSNFRKEF ELYKVREINDY | 981 |
| WP_019803776 | 911 | DD KAGFIKRQLVETROITKHVARILDERFNTETDENNKKIR--QVKIVTLKSNLVSNFRKEF ELYKVREINDY | 981 |
| WP_019805234 | 911 | DD KAGFIKROLVETRQITKHVARILDERFNTETDENNKKIR--QVKIVTLKSNLVSNFRKEF ELYKVREINDY | 981 |
| WP_024783594 | 911 | DD KAGFIKRQLVETROITKHVARILDERFNTETDENNKKIR--QVKIVTLKSNLVSNFRKEF ELYKVREINDY | 981 |
| WP_024784288 | 913 | DD KAGFIKRQLVETRQITKHVARMLDERFNKEFDDNNKRIR--RVKIVTLKSNLVSSFRKEF ELYKVREINDY | 983 |
| WP_024784666 | 911 | DD KAGFIKRQLVETRQITKHVARILDERFHTETDENNKKIR--QVKIVTLKSNLVSNERKEF ELYKVREINDY | 981 |
| WP_024784894 | 911 | DD KAGFIKROLVETROITKHVARILDERENTETDENNKKIR--QVKIVTLKSNLVSNERKEF ELYKVREINDY | 981 |
| WP_024786433 | 913 | DD KAGFIKRQLVETROITKHVARMLDERFNKEFDDNNKRIR--RVKIVTLKSNLVSSFRKEF ELYKVREINDY | 983 |
| WP_049473442 | 911 | DD KAGFIKRQLVETROITKHVARILDERENTETDENNKKIR--QVKIVTLKSNLVSNERKEF ELYKVREINDY | 981 |
| WP_049474547 | 911 | DD KAGFIKROLVETRQITKHVARILDERFNTETDENNKKIR--QVKIVTLKSNLVSNERKEF ELYKVREINDY | 981 |
| EMC03581 | 904 | DD KAGFIKRQLVETROITKHVARILDERFHTETDENNKKIR--QVKIVTLKSNLVSNFRKEF ELYKVREINDY | 974 |
| WP_000428612 | 916 | RD KVGFIKRQLVETRQITKHVAQILDARYNTEVNEKDKKNR--TVKIITLKSNLVSNERKEF RLYKIREINDY | 986 |
| WP_000428613 | 914 | RD KVGFIKRQLVETRQITKHVAQILDARFNKEVNEKDKKNR--TVKIITLKSNLVSNFRKEF RLYKVREINDY | 984 |
| WP_049523028 | 909 | RD KVGFIKRQLVETROITKHVAQILDDRFNAEVNEKNQKLR--SVKIITLKSNLVSNFRKEF GLYKVREINDY | 979 |
| WP_003107102 | 880 | YD KAGFIKRQLVETROITKHVAQILNNRENNNVDDSSKNKR--PVKIITLKSKMVSDFRKEF GFYKIREVNDY | 950 |
| WP_054279288 | 912 | SD KANFIQROLVETROITKHVAQILDSRENTERDEKDRPIR--RVKVITLKSKFVSDFRQDE GFYKLREINDY | 982 |
| WP_049531101 | 914 | RD KVGFIKRQLVETRQITKHVAQILDSRFNTKVNEKNQKIR--TVKIITLKSNLVSNFRKEF RLYKVREINDY | 984 |
| WP_049538452 | 914 | RD KVGFIRROLVETRQITKHVAQILDSRFNTEVTEKDKKNR--NVKIITLKSNLVSNFRKEF GLYKVREINDY | 984 |
| WP_049549711 | 916 | LD KVGFIKRQLVETROITKHVAQILDARFNKEVTEKDKKNR--NVKIITLKSNLVSNFRKEF RLYKVREINDY | 986 |
| WP_007896501 | 917 | SD KARFLRRQLVETROITKHVAQLLDSRENSKSNONKKLAR--NVKIITLKSKIVSDFRKDF GLYKLREVNNY | 987 |
| EFR44625 | 869 | SD KARFLRROLVETROITKHVAQLLDSRENSKSNONKKLAR--NVKIITLKSKIVSDFRKDF GLYKLREVNNY | 939 |
| WP_002897477 | 913 | RD KVGFIRROLVETQQITKNVAQILDARFNTEVKEKNQKIR--TVKIITLKSNLVSNERKEF GLYKVREINNY | 983 |
| WP_002906454 | 913 | RD KVGFIKRQLVETRQITKHVAQLLDTRENTEVNEENQKIR--TVKIITLKSNLVSNERKEF GLYKVREINDY | 983 |
| WP_009729476 | 914 | LD KVGFIKRQLVETRQITKHVAQILDARFNKEVTEKDKKNR--TVKIITLKSNLVSNFRKEF ELYKVREINDY | 984 |
| CQR24647 | 913 | ED KAGFIKRQLVETROITKHVARILDERFNRDEDKNDKRIR--NVKIVTLKSNLVSNERKEF GFYKVREINNF | 983 |
| WP_000066813 | 918 | LD KVGFIKRQLVETRQITKHVAQFLDARFNKEVTEKDKKNR--NVKIITLKSNLVSNFRKEF GLYKVREINDY | 988 |
| WP_009754323 | 914 | RD KVGFIKRQLVETRQITKHVARILDARFNTEVSEKNQKIR--SVKIITLKSNLVSNERKEF KLYKVREINDY | 984 |
| WP_044674937 | 913 | ED KARFIQRQLVETROITKHVARILDTRENTKLDEAGNRIRdpKVNIITLKSNLVSQFRKDY QLYKVREINNY | 985 |
| WP_044676715 | 915 | ED KARFIQRQLVETROITKHVARILDTRENTKLDEAGNRIRdpKVNIITLKSNLVSQFRKDY QLYKVREINNY | 987 |
| WP_044680361 | 915 | ED KARFIQRQLVETROITKHVARILDTRENTKLDEAGNRIRdpKVNIITLKSNLVSQFRKDY QLYKVREINNY | 987 |
| WP_044681799 | 913 | ED KARFIQRQLVETROITKHVARILDTRENTKLDEAGNRIRdpKVNIITLKSNLVSQFRKDY QLYKVREINNY | 985 |
| WP_049533112 | 910 | ND KAGFIKRQLVETRQITKHVAQVLDARFNAKHDENKKVIR--DVKIITLKSNLVSQFRKDF KFYKVREINDY | 980 |
| WP_029090905 | 891 | RD KEGFIARQLVETRQITKHVTQLLQQEY-----------K-dTTKVFAIKATLVSGLRRKF EFIKNRNVNDY | 951 |
| WP_006506696 | 917 | RD EERFINROLVETRQITKNVTQIIEDHYST-------------TKVAAIRANLSHEFRVKN HIYKNRDINDY | 976 |
| AIT42264 | 911 | LD KAGFIKRQLVETRQITKHVAQILDSRMNTKYDENDKLIR--EVKVITLKSKLVSDFRKDF QFYKVREINNY | 981 |
| WP_034440723 | 915 | RD ROOFINROLVETROITKHVANLLSHHLNEK-----KEVG--EINIVLLKSALTSQFRKKE DFYKVREVNDY | 980 |
| AKQ21048 | 911 | LD KAGFIKRQLVETROITKHVAQILDSRMNTKYDENDKLIR--EVKVITLKSKLVSDFRKDF QFYKVREINNY | 981 |
| WP_004636532 | 916 | AD RAHFLNRQLVETROITKHVANLLDSQYNTAEEQ-----R---INIVLLKSSMTSRFRKEF KLYKVREINDY | 980 |
| WP_002364836 | 922 | ED KAHFIQROLVETROITKNVAGILDQRYNANSKE-----K--KVQIITLKASLTSQFRSIF GLYKVREVNDY | 987 |
| WP_016631044 | 873 | ED KAHFIQRQLVETROITKNVAGILDQRYNAKSKE-----K--KVQIITLKASLTSQFRSIF GLYKVREVNDY | 938 |
| EMS75795 | 655 | ED KARFIQROLVETRQITKHVAAILDQYFN-QPEE-SK-NK--GIRIITLKSSLVSQFRKTF GINKVREINNH | 722 |
| WP_002373311 | 922 | ED KAHFIQROLVETRQITKNVAGILDQRYNAKSKE-----K--KVQIITLKASLTSQFRSIF GLYKVREVNDY | 987 |
| WP_002378009 | 922 | ED KAHFIQROLVETROITKNVAGILDQRYNAKSKE-----K--KVQIITLKASLTSQFRSIF GLYKVREVNDY | 987 |
| WP_002407324 | 922 | ED KAHFIQROLVETRQITKNVAGILDQRYNAKSKE-----K--KVQIITLKASLTSQFRSIF GLYKVREVNDY | 987 |
| WP_002413717 | 922 | ED KAHFIQRQLVETROITKNVAGILNQRYNANSKE-----K--KVQIITLKASLTSQFRSIF GLYKVREVNDY | 987 |
| WP_010775580 | 924 | ED KAHFIQROLVETROITKNVAGILDORYNAKSKE-----K--KVQIITLKASLTSQFRSIF GLYKVREVNDY | 989 |
| WP_010818269 | 922 | ED KAHFIQROLVETROITKNVAGILDQRYNAKSKE-----K--KVQIITLKASLTSQFRSIF GLYKVREVNDY | 987 |
| WP_010824395 | 922 | ED KAHFIQROLVETROITKNVAGILDQLYNAKSKE-----K--KVQIITLKASLTSQFRSIF GLYKVREVNDY | 987 |
| WP_016622645 | 922 | ED KAHFIQROLVETROITKNVAGILDQRYNAKSKE-----K--KVQIITLKASLTSQFRSIF GLYKVREVNDY | 987 |
| WP_033624816 | 922 | ED KAHFIQROLVETROITKNVAGILDQRYNAKSKE-----K--KVQIITLKASLTSQFRSIF GLYKVREVNDY | 987 |
| WP_033625576 | 922 | ED KAHFIQROLVETROITKNVAGILDQRYNAKSKE-----K--KVQIITLKASLTSQFRSIF GLYKVREVNDY | 987 |
| WP_033789179 | 922 | ED KAHFIQROLVETROITKNVAGILDQRYNAKSKE-----K--KVQIITLKASLTSQFRSIF GLYKVREVNDY | 987 |
| WP_002310644 | 919 | ED KAGFIKRQLVETRQITKHVAGILHHRFN-KAEDTNEPIR--KVRIITLKSALVSQFRNRF GIYKVREINEY | 988 |
| WP_002312694 | 920 | ED KAGFIKRQLVETRQITKHVAGILHHREN-KAEDTNDPIR--KVRIITLKSALVSQFRNRF GIYKVREINEY | 989 |
| WP_002314015 | 920 | ED KAGFIKRQLVETROITKHVAGILHHRFN-KAEDTNEPIR--KVRIITLKSALVSQFRNRF GIYKVREINEY | 989 |
| WP_002320716 | 920 | ED KAGFIKRQLVETROITKHVAGILHHREN-KAEDTNEPIR--KVRIITLKSALVSQFRNRF GIYKVREINEY | 989 |
| WP_002330729 | 919 | ED KAGFIKRQLVETROITKHVAGILHHREN-KAEDTNEPIR--KVRIITLKSALVSQFRNRF GIYKVREINEY | 988 |
| WP_002335161 | 920 | ED KAGFIKRQLVETROITKHVAGILHHREN-KAEDTNEPIR--KVRIITLKSALVSQFRNRF GIYKVREINEY | 989 |
| WP_002345439 | 920 | ED KAGFIKRQLVETRQITKHVAGILHHREN-KAEDTNEPIR--KVRIITLKSALVSQFRNRF GIYKVREINEY | 989 |
| WP_034867970 | 911 | ED KARFIQRQLVETROITKHVANILHQSFN-QEEEGTD-CD--GVQIITLKATLTSQFRQTF GLYKVREINPH | 979 |
| WP_047937432 | 920 | ED KAGFIKRQLVETROITKHVAGILHHREN-KAEDTNEPIR--KVRIITLKSALVSQFRNRF GIYKVREINEY | 989 |
| WP_010720994 | 911 | ED KARFIQROLVETROITKHVANILHOSFN-QEEEGTD-CD--GVQIITLKATLTSQFRQTF GLYKVREINPH | 979 |
| WP_010737004 | 911 | ED KARFIQRQLVETROITKHVANILHQSFN-QEEEGTD-CD--GVQIITLKATLTSQFROTF GLYKVREINPH | 979 |
| WP_034700478 | 911 | ED KARFIQRQLVETROITKHVANILHQSFN-QEEEGTD-CD--GVQIITLKATLTSQFRQTF GLYKVREINPH | 979 |
| WP_007209003 | 912 | SD KAGFLKRQLVETRQITKHVATILDSKFNE--DSNNRDVQ-----IITLKSALVSEFRKTF NLYKVREINDL | 977 |
| WP_023519017 | 905 | AD KARFIQRQLVETRQITKHVANLLHQHFN-LPEEVSA-TE--KTSIITLKSTLTSQFROMF DIYKVREINHH | 973 |
| WP_010770040 | 915 | DD RAHFIKRQLVETROITKHVARILDORFNSQKDEEGKTIR--AVRVVTLKSSLTSQFRKQF AIHKVREINDY | 985 |
| WP_048604708 | 912 | DD KAGFIHRQLVETROITKNVARILHQRFNSEKDEEGNLIR--KVRIITLKSALTSQFRKNY GIYKIREINDY | 982 |
| WP_010750235 | 914 | DD KARFIQROLVETRQITKHVAAILHQYFN-QTQELEK-EK--DIRIITLKSSLVSQFRQVF GIHKVREINHH | 982 |
| AII16583 | 950 | LD KAGFIKRQLVETROITKHVAQILDSRMNTKYDENDKLIR--EVKVITLKSKLVSDFRKDF QFYKVREINNY | 1020 |
| WP_029073316 | 928 | KD KERFINRQIVETROITKHVAQIISNHYET-------------TKVVTVRADLSHAFRERY HIYKNRDINDF | 987 |
| WP_031589969 | 928 | KD QERFINROIVETRQITKHVAQIIDNHYEN-------------TKVVTVRADLSHQFRERY HIYKNRDINDF | 987 |
| KDA45870 | 903 | KL KERFIERQLVETRQITKYVAQLLDORLN--YDGNGVELD-eKIAIVILKAQLASQFRSEF KLRKVRALNNL | 972 |
| WP_039099354 | 924 | -D MKGFINROLVETROVIKLATNLLMEQYGED-----------NIELITVKSGLTHQMRTEF DFPKNRNLNNH | 990 |
| AKP02966 | 926 | KD KLGFIHRQLVQTSQMVKGVANILNSMYK---NQGTTCIQ--------ARANLSTAFRKAL ELVKNRNINDF | 999 |
| WP_010991369 | 914 | AD KARFIHRQLVETRQITKNVANILHQRFNYEKDDHGNTMK--QVRIVTLKSALVSQFRKOF QLYKVRDVNDY | 984 |
| WP_033838504 | 914 | AD KARFIHRQLVETROITKNVANILHQRFNYEKDDHGNTMK--QVRIVTLKSALVSQFRKOF QLYKVRDVNDY | 984 |
| EHN60060 | 917 | AD KARFIHRQLVETROITKNVANILHQRFNYEKDDHGNTMK--QVRIVTLKSALVSQFRKOF QLYKVRDVNDY | 987 |
| EFR89594 | 683 | AD KARFIHRQLVETRQITKNVANILHQRFNYGKDDHGNTMK--QVRIVTLKSALVSQFRKOF QLYKVRGVNDY | 753 |
| WP_038409211 | 914 | AD KANFIQRQLVETROITKNVANILYQRFNCKQDENGNEVE--QVRIVTLKSTLVSQFRKOF QLYKVREVNDY | 984 |
| EFR95520 | 533 | AD KANFIQRQLVETROITKNVANILYQRFNCKQDENGNEVE--QVRIVTLKSTLVSQFRKOF QLYKVREVNDY | 603 |
| WP_003723650 | 914 | AD KARFIHRQLVETRQITKNVANILYQRFNKETDNHGNTME--QVRIVTLKSALVSQFRKOF QLYKVREVNGY | 984 |
| WP_003727705 | 914 | AD KARFIHRQLVETRQITKNVANILHQRFNKETDNHGNTME--QVRIVTLKSALVSQFRKOF QLYKVREVNDY | 984 |
| WP_003730785 | 914 | AD KARFIHRQLVETRQITKNVANILHQRFNKETDNHGNTME--QVRIVTLKSALVSQFRKOF QLYKVREVNDY | 984 |
| WP_003733029 | 914 | AD KARFIHRQLVETRQITKNVANILHQRFNYKTDGNKDTME--TVRIVTLKSALVSQFRKOF QFYKVREVNDY | 984 |
| WP_003739838 | 914 | AD KATFIHRQLVETROITKNVANILHQRFNNETDNHGNNME--QVRIVMLKSALVSQFRKOF QLYKVREVNDY | 984 |
| WP_014601172 | 914 | AD KARFIHRQLVETRQITKNVANILHQRENNETDNHGNTME--QVRIVTLKSALVSOFRKOF QLYKVREVNDY | 984 |
| WP_023548323 | 914 | AD KARFIHRQLVETRQITKNVANILHQRFNYKTDDNEDTME--PVRIVTLKSALVSQFRKOF QLYKVREVNDY | 984 |
| WP_031665337 | 914 | AD KARFIHRQLVETRQITKNVANILHQRFNKETDNHGNTME--QVRIVTLKSALVSQFRKOF QLYKVREVNDY | 984 |
| WP_031669209 | 914 | AD KARFIHRQLVETROITKNVANILHQRFNYKTDGNKDTME--TVRIVTLKSALVSQFRKOF QFYKVREVNDY | 984 |
| WP_033920898 | 914 | AD KARFIHRQLVETRQITKNVANILHQRFNYKTDDNEDTME--PVRIVTLKSALVSQFRKOF QLYKVREVNDY | 984 |
| AKI42028 | 917 | AD KARFIHRQLVETROITKNVANILHQRFNNETDNHGNTME--QVRIVTLKSALVSQFRKOF QLYKVREVNDY | 987 |
| AKI50529 | 917 | AD KARFIHRQLVETROITKNVANILHQRFNYKTDDNEDTME--PVRIVTLKSALVSQFRKOF QLYKVREVNDY | 987 |
| EFR83390 | 362 | AD KARFIHRQLVETRQITKNVANILHQRENNETDNHGNTME--QVRIVTLKSALVSQFRKOF QLYKVREVNDY | 432 |
| WP_046323366 | 914 | AD KARFIHRQLVETRQITKNVANILHQRFNCKKDESGNVIE--QVRIVTLKAALVSQFRKOF QLYKVREVNDY | 984 |
| AKE81011 | 927 | LD KAGFIKRQLVETROITKHVAQILDSRMNTKYDENDKLIR--EVKVITLKSKLVSDERKDF QFYKVREINNY | 997 |
| CUO82355 | 921 | RD EERFINROLVETRQITKNVTQIIEDHYST-------------TKVAAIRANLSHEFRVKN HIYKNRDINDY | 980 |
| WP_033162887 | 923 | KD KERFINROLVETRQIIKNVAVIINDHYTN-------------TNIVTVRAELSHQFRERY KIYKNRDINDF | 982 |
| AGZ01981 | 944 | LD KAGFIKRQLVETROITKHVAQILDSRMNTKYDENDKLIR--EVKVITLKSKLVSDFRKDF QFYKVREINNY | 1014 |
| AKA60242 | 911 | LD KAGFIKRQLVETROITKHVAQILDSRMNTKYDENDKLIR--EVKVITLKSKLVSDERKDE QFYKVREINNY | 981 |
| AKS40380 | 911 | LD KAGFIKRQLVETROITKHVAQILDSRMNTKYDENDKLIR--EVKVITLKSKLVSDERKDF QFYKVREINNY | 981 |
| 4UN5_B | 915 | LD KAGFIKRQLVETROITKHVAQILDSRMNTKYDENDKLIR--EVKVITLKSKLVSDFRKDF QFYKVREINNY | 985 |
| WP_010922251 | 982 | [chemical structure] | 1051 |
| WP_039695303 | 992 | HHAHDAYLNAVVGTALLKKYPKL-ASEFVYGEYKKYDI S---SD------ KATAK--YfFYSNLM-NFFKTKVK | 1058 |
| WP_045635197 | 984 | HHAHDAYLNAVVAKAILKKYPKL-EPEFVYGEYQKYDL SkdpKEV---EK ATEKY--F-FYSNLL-NFFKEEVH | 1055 |
| 5AXW_A | 703 | HHAEDALI--------------IaNADFIFKEWKKLDK Nq-mFE----EK ETEQEykEiFITPHQiKHIKDFKD | 771 |
| WP_009880683 | 666 | HHAHDAYLNAVVGTALIKKYPKL-ESEFVYGDYKVYDI S---EQEi--GK ATAKY--F-FYSNIM-NFFKTEIT | 735 |
| WP_010922251 | 982 | HHAHDAYLNAVVGTALIKKYPKL-ESEFVYGDYKVYDV S---EQEi--GK ATAKY--F-FYSNIM-NFFKTEIT | 1051 |
| WP_011054416 | 982 | HHAHDAYLNAVVGTALIKKYPKL-ESEFVYGDYKVYDV S---EQEi--GK ATAKY--F-FYSNIM-NFFKTEIT | 1051 |
| WP_011284745 | 982 | HHAHDAYLNAVVGTALIKKYPKL-ESEFVYGDYKVYDV S---EQEi--GK ATAKY--F-FYSNIM-NFFKTEIT | 1051 |
| WP_011285506 | 982 | HHAHDAYLNAVVGTALIKKYPKL-ESEFVYGDYKVYDV S---EQEi--GK ATAKY--F-FYSNIM-NFFKTEIT | 1051 |
| WP_011527619 | 982 | HHAHDAYLNAVVGTALIKKYPKL-ESEFVYGDYKVYDV S---EQEi--GK ATAKY--F-FYSNIM-NFFKTEIT | 1051 |
| WP_012560673 | 982 | HHAHDAYLNAVVGTALIKKYPKL-ESEFVYGDYKVYDI S---EQEi--GK ATAKY--F-FYSNIM-NFFKTEIT | 1051 |
| WP_014407541 | 981 | HHAHDAYLNAVVGTALIKKYPKL-ESEFVYGDYKVYDV S---EQEi--GK ATAKY--F-FYSNIM-NFFKTEIT | 1050 |
| WP_020905136 | 982 | HHAHDAYLNAVVGTALIKKYPKL-ESEFVYGDYKVYDV S---EQEi--GK ATAKY--F-FYSNIM-NFFKTEIT | 1051 |
| WP_023080005 | 981 | HHAHDAYLNAVVGTALIKKYPKL-ESEFVYGDYKVYDV S---EQEi--GK ATAKY--F-FYSNIM-NFFKTEIT | 1050 |
| WP_023610282 | 981 | HHAHDAYLNAVVGTALIKKYPKL-ESEFVYGDYKVYDV S---EQEi--GK ATAKY--F-FYSNIM-NFFKTEIT | 1050 |
| WP_030125963 | 982 | HHAHDAYLNAVVGTALIKKYPKL-ESEFVYGDYKVYDV S---EQEi--GK ATAKY--F-FYSNIM-NFFKTEIT | 1051 |
| WP_030126706 | 982 | HHAHDAYLNAVVGTALIKKYPKL-ESEFVYGDYKVYDV S---EQEi--GK ATAKY--F-FYSNIM-NFFKTEIT | 1051 |
| WP_031488318 | 982 | HHAHDAYLNAVVGTALIKKYPKL-ESEFVYGDYKVYDV S---EQEi--GK ATAKY--F-FYSNIM-NFFKTEIT | 1051 |
| WP_032460140 | 982 | HHAHDAYLNAVVGTALIKKYPKL-ESEFVYGDYKVYDI S---EQEi--GK ATAKY--F-FYSNIM-NFFKTEIT | 1051 |
| WP_032461047 | 982 | HHAHDAYLNAVVGTALIKKYPKL-ESEFVYGDYKVYDI S---EQEi--GK ATAKY--F-FYSNIM-NFFKTEIT | 1051 |
| WP_032462016 | 982 | HHAHDAYLNAVVGTALIKKYPKL-ESEFVYGDYKVYDV S---EQEi--GK ATAKY--F-FYSNIM-NFFKTEIT | 1051 |
| WP_032462936 | 982 | HHAHDAYLNAVVGTALIKKYPKL-ESEFVYGDYKVYDV S---EQEi--GK ATAKY--F-FYSNIM-NFFKTEIT | 1051 |
| WP_032464890 | 982 | HHAHDAYLNAVVGTALIKKYPKL-ESEFVYGDYKVYDV S---EQEi--GK ATAKY--F-FYSNIM-NFFKTEIT | 1051 |
| WP_033888930 | 807 | HHAHDAYLNAVVGTALIKKYPKL-ESEFVYGDYKVYDV S---EQEi--GK ATAKY--F-FYSNIM-NFFKTEIT | 876 |
| WP_038431314 | 982 | HHAHDAYLNAVVGTALIKKYPKL-ESEFVYGDYKVYDV S---EQEi--GK ATAKY--F-FYSNIM-NFFKTEIT | 1051 |
| WP_038432938 | 981 | HHAHDAYLNAVVGTALIKKYPKL-ESEFVYGDYKVYDV S---EQEi--GK ATAKY--F-FYSNIM-NFFKTEIT | 1050 |
| WP_038434062 | 982 | HHAHDAYLNAVVGTALIKKYPKL-ESEFVYGDYKVYDV S---EQEi--GK ATAKY--F-FYSNIM-NFFKTEIT | 1051 |
| BAQ51233 | 893 | HHAHDAYLNAVVGTALIKKYPKL-ESEFVYGDYKVYDV S---EQEi--GK ATAKY--F-FYSNIM-NFFKTEIT | 962 |
| KGE60162 | 157 | HHAHDAYLNAVVGTALIKKYPKL-ESEFVYGDYKVYDV S---EQEi--GK ATAKY--F-FYSNIM-NFFKTEIT | 226 |
| KGE60856 | | -------------------------------------- ------------ ------------------------ | |
| WP_002989955 | 982 | HHAHDAYLNAVVGTALIKKYPKL-ESEFVYGDYKVYDV S---EQEi--GK ATAKY--F-FYSNIM-NFFKTEIT | 1051 |
| WP_003030002 | 981 | HHAHDAYLNAVVGNALLLKYPQL-EPEFVYGEYPKYN- S---YR---sRK SATEK--FIFYSNIL-RFFKKE-- | 1041 |
| WP_003065552 | 992 | HHAHDAYLNAVVGTALLKKYPKL-ASEFVYGEYKKYDI S---SD------ KATAK--YfFYSNLM-NFFKRVIR | 1058 |
| WP_001040076 | 987 | HHAHDAYLNAVVAKAILTKYPOL-EPEFVYGDYPKYN- S---YKT---RK ATEKL--F-FYSNIM-NFFKTKVT | 1049 |
| WP_001040078 | 987 | HHAHDAYLNAVVAKAILTKYPQL-EPEFVYGLYRRKK- L---SKI---VR ATRKM--F-FYSNLM-NMFKRVVR | 1057 |
| WP_001040080 | 987 | HHAHDAYLNAVVAKAILTKYPOL-EPEFVYGDYPKYN- S---YKT---RK ATEKL--F-FYSNIM-NFFKTKVT | 1049 |
| WP_001040081 | 987 | HHAHDAYLNAVVAKAILTKYPOL-EPEFVYGDYPKYN- S---YKT---RK ATEKL--F-FYSNIM-NFFKTKVT | 1049 |
| WP_001040083 | 987 | HHAHDAYLNAVVAKAILTKYPOL-EPEFVYGDYPKYN- S---YKT---RK ATEKL--F-FYSNIM-NFFKTKVT | 1049 |
| WP_001040085 | 987 | HHAHDAYLNAVVAKAILTKYPQL-EPEFVYGDYPKYN- S---YKT---RK ATEKL--F-FYSNIM-NFFKTKVT | 1049 |
| WP_001040087 | 987 | HHAHDAYLNAVVAKAILTKYPOL-EPEFVYGDYPKYN- S---YKT---RK ATEKL--F-FYSNIM-NFFKTKVT | 1049 |
| WP_001040088 | 987 | HHAHDAYLNAVVAKAILTKYPOL-EPEFVYGDYPKYN- S---YKT---RK ATEKL--F-FYSNIM-NFFKTKVT | 1049 |
| WP_001040089 | 987 | HHAHDAYLNAVVAKAILTKYPOL-EPEFVYGDYPKYN- S---YKT---RK ATEKL--F-FYSNIM-NFFKTKVT | 1049 |
| WP_001040090 | 987 | HHAHDAYLNAVVAKAILTKYPOL-EPEFVYGDYPKYN- S---YKT---RK ATEKL--F-FYSNIM-NFFKTKVT | 1049 |
| WP_001040091 | 987 | HHAHDAYLNAVVAKAILTKYPOL-EPEFVYGDYPKYN- S---YKT---RK ATEKL--F-FYSNIM-NFFKTKVT | 1049 |
| WP_001040092 | 987 | HHAHDAYLNAVVAKAILTKYPOL-EPEFVYGDYPKYN- S---YKT---RK ATEKL--F-FYSNIM-NFFKTKVT | 1049 |
| WP_001040094 | 987 | HHAHDAYLNAVVAKAILTKYPOL-EPEFVYGDYPKYN- S---YKT---RK ATEKL--F-FYSNIM-NFFKTKVT | 1049 |
| WP_001040095 | 987 | HHAHDAYLNAVVAKAILTKYPOL-EPEFVYGDYPKYN- S---YKT---RK ATEKL--F-FYSNIM-NFFKTKVT | 1049 |
| WP_001040096 | 987 | HHAHDAYLNAVVAKAILTKYPOL-EPEFVYGDYPKYN- S---YKT---RK ATEKL--F-FYSNIM-NFFKTKVT | 1049 |
| WP_001040097 | 987 | HHAHDAYLNAVVAKAILTKYPOL-EPEFVYGDYPKYN- S---YKT---RK ATEKL--F-FYSNIM-NFFKTKVT | 1049 |
| WP_001040098 | 987 | HHAHDAYLNAVVAKAILTKYPOL-EPEFVYGDYPKYN- S---YKT---RK ATEKL--F-FYSNIM-NFFKTKVT | 1049 |
| WP_001040099 | 987 | HHAHDAYLNAVVAKAILTKYPOL-EPEFVYGDYPKYN- S---YKT---RK ATEKL--F-FYSNIM-NFFKTKVT | 1049 |
| WP_001040100 | 987 | HHAHDAYLNAVVAKAILTKYPOL-EPEFVYGDYPKYN- S---YKT---RK ATEKL--F-FYSNIM-NFFKTKVT | 1049 |
| WP_001040104 | 987 | HHAHDAYLNAVVAKAILTKYPOL-EPEFVYGDYPKYN- S---YKT---RK ATEKL--F-FYSNIM-NFFKTKVT | 1049 |
| WP_001040105 | 987 | HHAHDAYLNAVVAKAILTKYPOL-EPEFVYGDYPKYN- S---YKT---RK ATEKL--F-FYSNIM-NFFKTKVT | 1049 |
| WP_001040106 | 987 | HHAHDAYLNAVVAKAILTKYPOL-EPEFVYGDYPKYN- S---YKT---RK ATEKL--F-FYSNIM-NFFKTKVT | 1049 |
| WP_001040107 | 987 | HHAHDAYLNAVVAKAILTKYPOL-EPEFVYGDYPKYN- S---YKT---RK ATEKL--F-FYSNIM-NFFKTKVT | 1049 |
| WP_001040108 | 987 | HHAHDAYLNAVVAKAILTKYPOL-EPEFVYGDYPKYN- S---YKT---RK ATEKL--F-FYSNIM-NFFKTKVT | 1049 |
| WP_001040109 | 987 | HHAHDAYLNAVVAKAILTKYPOL-EPEFVYGDYPKYN- S---YKT---RK ATEKL--F-FYSNIM-NFFKTKVT | 1049 |
| WP_001040110 | 987 | HHAHDAYLNAVVAKAILTKYPOL-EPEFVYGDYPKYN- S---YKT---RK ATEKL--F-FYSNIM-NFFKTKVT | 1049 |
| WP_015058523 | 987 | HHAHDAYLNAVVAKAILTKYPOL-EPEFVYGDYPKYN- S---YKT---RK ATEKL--F-FYSNIM-NFFKTKVT | 1049 |
| WP_017643650 | 987 | HHAHDAYLNAVVAKAILTKYPOL-EPEFVYGDYPKYN- S---YKT---RK ATEKL--F-FYSNIM-NFFKTKVT | 1049 |
| WP_017647151 | 987 | HHAHDAYLNAVVAKAILTKYPOL-EPEFVYGDYPKYN- S---YKT---RK ATEKL--F-FYSNIM-NFFKTKVT | 1049 |
| WP_017648376 | 987 | HHAHDAYLNAVVAKAILTKYPOL-EPEFVYGDYPKYN- S---YKT---RK ATEKL--F-FYSNIM-NFFKTKVT | 1049 |
| WP_017649527 | 987 | HHAHDAYLNAVVAKAILTKYPOL-EPEFVYGDYPKYN- S---YKT---RK ATEKL--F-FYSNIM-NFFKTKVT | 1049 |
| WP_017771611 | 987 | HHAHDAYLNAVVAKAILTKYPOL-EPEFVYGDYPKYN- S---YKT---RK ATEKL--F-FYSNIM-NFFKTKVT | 1049 |
| WP_017771984 | 987 | HHAHDAYLNAVVAKAILTKYPOL-EPEFVYGDYPKYN- S---YKT---RK ATEKL--F-FYSNIM-NFFKTKVT | 1049 |
| CFQ25032 | 987 | HHAHDAYLNAVVAKAILTKYPOL-EPEFVYGDYPKYN- S---YKT---RK ATEKL--F-FYSNIM-NFFKTKVT | 1049 |
| CVF16040 | 987 | HHAHDAYLNAVVAKAILTKYPOL-EPEFVYGDYPKYN- S---YKT---RK ATEKL--F-FYSNIM-NFFKTKVT | 1049 |
| KLJ37842 | 987 | HHAHDAYLNAVVAKAILTKYPOL-EPEFVYGDYPKYN- S---YKT---RK ATEKL--F-FYSNIM-NFFKTKVT | 1049 |
| KLJ72361 | 987 | HHAHDAYLNAVVAKAILTKYPOL-EPEFVYGDYPKYN- S---YKT---RK ATEKL--F-FYSNIM-NFFKTKVT | 1049 |
| KLL20707 | 1001 | HHAHDAYLNAVVAKAILTKYPOL-EPEFVYGDYPKYN- S---YKT---RK ATEKL--F-FYSNIM-NFFKTKVT | 1063 |
| KLL42645 | 987 | HHAHDAYLNAVVAKAILTKYPOL-EPEFVYGDYPKYN- S---YKT---RK ATEKL--F-FYSNIM-NFFKTKVT | 1049 |
| WP_047207273 | 987 | HHAHDAYLNAVVAKAILTKYPOL-EPEFVYGDYPKYN- S---YKT---RK ATEKL--F-FYSNIM-NFFKTKVT | 1049 |
| WP_047209694 | 987 | HHAHDAYLNAVVAKAILTKYPOL-EPEFVYGDYPKYN- S---YKT---RK ATEKL--F-FYSNIM-NFFKTKVT | 1049 |
| WP_050198062 | 987 | HHAHDAYLNAVVAKAILTKYPOL-EPEFVYGDYPKYN- S---YKT---RK ATEKL--F-FYSNIM-NFFKTKVT | 1049 |
| WP_050201642 | 987 | HHAHDAYLNAVVAKAILTKYPOL-EPEFVYGDYPKYN- S---YKT---RK ATEKL--F-FYSNIM-NFFKTKVT | 1049 |
| WP_050204027 | 987 | HHAHDAYLNAVVAKAILTKYPOL-EPEFVYGDYPKYN- S---YKT---RK ATEKL--F-FYSNIM-NFFKTKVT | 1049 |
| WP_050881965 | 987 | HHAHDAYLNAVVAKAILTKYPOL-EPEFVYGDYPKYN- S---YKT---RK ATEKL--F-FYSNIM-NFFKTKVT | 1049 |
| WP_050886065 | 987 | HHAHDAYLNAVVAKAILTKYPOL-EPEFVYGDYPKYN- S---YKT---RK ATEKL--F-FYSNIM-NFFKTKVT | 1049 |
| AHN30376 | 987 | HHAHDAYLNAVVAKAILTKYPQL-EPEFVYGDYPKYN- S---YKT---RK ATEKL--F-FYSNIM-NFFKTKVT | 1049 |
| EAO78426 | 987 | HHAHDAYLNAVVAKAILTKYPOL-EPEFVYGDYPKYN- S---YKT---RK ATEKL--F-FYSNIM-NFFKTKVT | 1049 |
| CCW42055 | 987 | HHAHDAYLNAVVAKAILTKYPOL-EPEFVYGDYPKYN- S---YKT---RK ATEKL--F-FYSNIM-NFFKTKVT | 1049 |
| WP_003041502 | 981 | HHAHDAYLNAVIGTALLKKYPKL-ASEFVYGEFKKYDV S---DK---eIG KATAK--YfFYSNLM-NFFKKEVK | 1050 |
| WP_037593752 | 982 | HHAHDAYLNAVVGNALLLKYPOL-EPEFVYGEYPKYN- S---YR---SRK SATEK--FlFYSNIL-RFFKKE-- | 1042 |
| WP_049516684 | 982 | HHAHDAYLNAVVGNALLLKYPOL-EPEFVYGEYPKYN- S---YR---SRK SATEK--FlFYSNIL-RFFKKE-- | 1042 |
| GAD46167 | 981 | HHAHDAYLNAVVGNALLLKYPOL-EPEFVYGEYPKYN- S---YR---SRK SATEK--FlFYSNIL-RFFKKE-- | 1041 |
| WP_018363470 | 990 | HHAHDAYLNAVVGTALLKKYPKL-APEFVYGEYKKYDV S---SDDhseMG KATAK--YfFYSNLM-NFFKRNIR | 1062 |
| WP_003043819 | 991 | HHAHDAYLNAVVGTALIKKYPKL-ESEFVYGDYKVYDV S---EQEi--GK ATAKR--F-FYSNIM-NFFKTEVK | 1060 |
| WP_006269658 | 981 | HHAHDAYLNAVVGNALLLKYPOL-EPEFVYGEYPKYN- S---YR---SRK SATEK--FlFYSNIL-RFFKKE-- | 1041 |
| WP_048800889 | 981 | HHAHDAYLNAVVGTALLKKYPKL-TSEFVYGEYKKYDV S---DND--eIG KATAK--YfFYSNLM-NFFKKEVK | 1051 |
| WP_012767106 | 981 | HHAHDAYLNAVVGTALIKKYTKL-ESEFVYGDYKVYDV S---EQEi--GK ATAKR--F-FYSNIM-NFFKTEIT | 1050 |
| WP_014612333 | 981 | HHAHDAYLNAVVGTALIKKYPKL-ESEFVYGDYKVYDV S---EQEi--GK ATAKR--F-FYSNIM-NFFKTEIT | 1050 |
| WP_015017095 | 981 | HHAHDAYLNAVVGTALIKKYPKL-ESEFVYGDYKVYDV S---EQEi--GK ATAKR--F-FYSNIM-NFFKTEIT | 1050 |
| WP_015057649 | 981 | HHAHDAYLNAVVGTALIKKYPKL-ESEFVYGDYKVYDV S---EQEi--GK ATAKR--F-FYSNIM-NFFKTEIT | 1050 |
| WP_048327215 | 981 | HHAHDAYLNAVVGTALIKKYPKL-ESEFVYGDYKVYDV S---EQEi--GK ATAKR--F-FYSNIM-NFFKTEIT | 1050 |
| WP_049519324 | 981 | HHAHDAYLNAVVGTALIKKYPKL-ESEFVYGDYKVYDV S---EQEi--GK ATAKR--F-FYSNIM-NFFKTEIT | 1050 |
| WP_012515931 | 981 | HHAHDAYLNAVVAKAILGKYPQL-APEFVYGDYPKYN- S---FKEr--QK ATQKM--L-FYSNIL-KFFKDQES | 1043 |
| WP_021320964 | 981 | HHAHDAYLNAVVAKAILGKYPQL-APEFVYGDYPKYN- S---FKEr--QK ATQKT--L-FYSNIL-KFFKDQES | 1043 |
| WP_037581760 | 981 | HHAHDAYLNAVVAKAILGKYPQL-APEFVYGDYPKYN- S---FKEr--QK ATQKT--L-FYSNIL-KKFKDQES | 1043 |
| WP_004232481 | 989 | HHAHDAYLNAVVGTALLKKYPKL-APEFVYGEYKKYDV S---SDNhseLG KATAK--YfFYSNLM-NFFKTEVK | 1061 |
| WP_009854540 | 990 | HHAHDAYLNAVVGTALLKKYPKL-ASEFVYGEYKKYDI S---SD------ KATAK--YfFYSNLM-NFFKTKVK | 1056 |
| WP_012962174 | 990 | HHAHDAYLNAVVGTALLKKYPKL-APEFVYGEYKKYDI S---GD------ KATAK--YfFYSNLM-NFFKRVIR | 1056 |
| WP_039695303 | 992 | HHAHDAYLNAVVGTALLKKYPKL-ASEFVYGEYKKYDI S---SD------ KATAK--YfFYSNLM-NFFKTKVK | 1058 |
| WP_014334983 | 989 | HHAHDAYLNAVVGTALLKKYPKL-TPEFVYGEYKKYDV S---SDDyseMG KATAK--YfFYSNLM-NFFKTEVK | 1061 |
| WP_003099269 | 982 | HHAQDAYLNAVVGTALLKKYPKL-EAEFVYGDYKHYDL P---DSS1--GK ATTRM--F-FYSNLM-NFFKKEIK | 1051 |
| AHY15608 | 982 | HHAQDAYLNAVVGTALLKKYPKL-EAEFVYGDYKHYDL P---DSS1--GK ATTRM--F-FYSNLM-NFFKKEIK | 1051 |
| AHY17476 | 982 | HHAQDAYLNAVVGTALLKKYPKL-EAEFVYGDYKHYDL P---DSS1--GK ATTRM--F-FYSNLM-NFFKKEIK | 1051 |
| ESR09100 | | -------------------------------------- ------------ ------------------------ | |
| AGM98575 | 982 | HHAQDAYLNAVVGTALLKKYPKL-EAEFVYGDYKHYDL P---DSS1--GK ATTRM--F-FYSNLM-NFFKKEIK | 1051 |
| ALF27331 | 982 | HHAHDAYLNAVIGKALLGVYPQL-EPEFVYGDYPHFH- G---HK---eNK ATAKK--F-FYSNIM-NFFKKD-- | 1041 |
| WP_018372492 | 995 | HHAHDAYLNAVVAQALLKVYPKF-ERELVYGSYVKESI ----FS----RK ATERM---rMYNNIL-KFISKD-- | 1055 |
| WP_045618028 | 985 | HHAHDPYLNAVVAKAILKKYPKL-EPEFVYGDYQKYDL TkdpKEV---EK ATEKY--F-FYSNLL-NFFKEEVH | 1056 |
| WP_045635197 | 984 | HHAHDAYLNAVVAKAILKKYPKL-EPEFVYGEYQKYDL SkdpKEV---EK ATEKY--F-FYSNLL-NFFKEEVH | 1055 |
| WP_002263549 | 982 | HHAHDAYLNAVIGKALLGVYPQL-EPEFVYGDYPHFH- G---HK---eNK ATAKK--F-FYSNIM-NFFKKD-- | 1041 |
| WP_002263887 | 982 | HHAHDAYLNAVIGKALLGVYPQL-EPEFVYGDYPHFH- G---HK---eNK ATAKK--F-FYSNIM-NFFKKD-- | 1041 |
| WP_002264920 | 982 | HHAHDAYLNAVIGKALLGVYPQL-EPEFVYGDYPHFH- G---HK---eNK ATAKK--F-FYSNIM-NFFKKD-- | 1041 |
| WP_002269043 | 982 | HHAHDAYLNAVIGKALLGVYPQL-EPEFVYGDYPHFH- G---HK---eNK ATAKK--F-FYSNIM-NFFKKD-- | 1041 |
| WP_002269448 | 982 | HHAHDAYLNAVIGKALLGVYPQL-EPEFVYGDYPHFH- G---HK---eNK ATAKK--F-FYSNIM-NFFKKD-- | 1041 |
| WP_002271977 | 982 | HHAHDAYLNAVIGKALLGVYPQL-EPEFVYGDYPHFH- G---HK---eNK ATAKK--F-FYSNIM-NFFKKD-- | 1041 |
| WP_002272766 | 982 | HHAHDAYLNAVIGKALLGVYPQL-EPEFVYGDYPHFH- G---HE---eNK ATAKK--F-FYSNIM-NFFKKD-- | 1041 |
| WP_002273241 | 982 | HHAHDAYLNAVIGKALLGVYPQL-EPEFVYGDYPHFH- G---HK---eNK ATAKK--F-FYSNIM-NFFKKD-- | 1041 |
| WP_002275430 | 982 | HHAHDAYLNAVIGKALLGVYPQL-EPEFVYGDYPHFH- G---HE---eNK ATAKK--F-FYSNIM-NFFKKD-- | 1041 |
| WP_002275430 | 982 | HHAHDAYLNAVIGKALLGVYPQL-EPEFVYGDYPHFH- G---HK---eNK ATAKK--F-FYSNIM-NFFKKD-- | 1041 |
| WP_002276448 | 982 | HHAHDAYLNAVIGKALLGVYPQL-EPEFVYGDYPHFH- G---YR---eRK ATAKK--F-FYSNIM-NFFKKD-- | 1041 |
| WP_002277050 | 984 | HHAHDAYLNAVVVKALLVKYPKL-EPEFVYGEYPLYN- S---YR---eRK ATQKM--F-FYSNIM-NMFKSKVK | 1046 |
| WP_002277364 | 982 | HHAHDAYLNAVIGKALLGVYPQL-EPEFVYGDYPHFH- G---HK---eNK ATAKK--F-FYSNIM-NFFKKD-- | 1041 |
| WP_002279025 | 982 | HHAHDAYLNAVIGKALLGVYPQL-EPEFVYGDYPHFH- G---HE---eNK ATAKK--F-FYSNIM-NFFKKD-- | 1041 |
| WP_002279859 | 982 | HHAHDAYLNAVIGKALLGVYPQL-EPEFVYGDYPHFH- G---HK---eNK ATAKK--F-FYSNIM-NFFKKD-- | 1041 |
| WP_002280230 | 982 | HHAHDAYLNAVIGKALLGVYPQL-EPEFVYGDYPHFH- G---HK---eNK ATAKK--F-FYSNIM-NFFKKD-- | 1041 |
| WP_002281696 | 982 | HHAHDAYLNAVIGKALLGVYPQL-EPEFVYGDYPHFH- G---HK---eNK ATAKK--F-FYSNIM-NFFKKD-- | 1041 |
| WP_002282247 | 984 | HHAHDAYLNAVVVKALLVKYPKL-EPEFVYGDYPHFH- S---YR---eRK ATQKM--F-FYSNIM-NMFKSKVK | 1046 |
| WP_002282906 | 982 | HHAHDAYLNAVIGKALLGVYPQL-EPEFVYGDYPHFH- G---HK---eNK ATAKK--F-FYSNIM-NFFKKD-- | 1041 |
| WP_002283846 | 982 | HHAHDAYLNAVIGKALLGVYPQL-EPEFVYGDYPHFH- G---HK---eNK ATAKK--F-FYSNIM-NFFKKD-- | 1041 |
| WP_002287255 | 982 | HHAHDAYLNAVIGKALLGVYPQL-EPEFVYGDYPHFH- G---HK---eNK ATAKK--F-FYSNIM-NFFKKD-- | 1041 |
| WP_002288990 | 982 | HHAHDAYLNAVIGKALLGVYPQL-EPEFVYGDYPHFH- G---HK---eNK ATAKK--F-FYSNIM-NFFKKD-- | 1041 |
| WP_002289641 | 982 | HHAHDAYLNAVIGKALLGVYPQL-EPEFVYGDYPHFH- G---HK---eNK ATAKK--F-FYSNIM-NFFKKD-- | 1041 |
| WP_002290427 | 982 | HHAHDAYLNAVIGKALLGVYPQL-EPEFVYGDYPHFH- G---HK---eNK ATAKK--F-FYSNIM-NFFKKD-- | 1041 |
| WP_002295753 | 982 | HHAHDAYLNAVIGKALLGVYPQL-EPEFVYGDYPHFH- G---HK---eNK ATAKK--F-FYSNIM-NFFKKD-- | 1041 |
| WP_002296423 | 982 | HHAHDAYLNAVIGKALLGVYPQL-EPEFVYGDYPHFH- G---HK---eNK ATAKK--F-FYSNIM-NFFKKD-- | 1041 |
| WP_002304487 | 996 | HHAHDAYLNAVIGKALLGVYPQL-EPEFVYGDYPHFH- G---HK---eNK ATAKK--F-FYSNIM-NFFKKG-- | 1055 |
| WP_002305844 | 982 | HHAHDAYLNAVIGKALLGVYPQL-EPEFVYGDYPHFH- G---HK---eNK ATAKK--F-FYSNIM-NFFKKD-- | 1041 |
| WP_002307203 | 982 | HHAHDAYLNAVIGKALLGVYPQL-EPEFVYGDYPHFH- G---HK---eNK ATAKK--F-FYSNIM-NFFKKD-- | 1041 |
| WP_002310390 | 982 | HHAHDAYLNAVIGKALLGVYPQL-EPEFVYGDYPHFH- G---HK---eNK ATAKK--F-FYSNIM-NFFKKD-- | 1041 |
| WP_002310390 | 982 | HHAHDAYLNAVIGKALLGVYPQL-EPEFVYGDYPHFH- G---HK---eNK ATAKK--F-FYSNIM-NFFKKD-- | 1041 |
| WP_002352408 | 982 | HHAHDAYLNAVIGKALLGVYPQL-EPEFVYGDYPHFH- G---HK---eNK ATAKK--F-FYSNIM-NFFKKD-- | 1041 |
| WP_012997688 | 982 | HHAHDAYLNAVIGKALLGVYPQL-EPEFVYGDYPHFH- G---HK---eNK ATAKK--F-FYSNIM-NFFKKD-- | 1041 |
| WP_014677909 | 982 | HHAHDAYLNAVIGKALLGVYPQL-EPEFVYGDYPHFH- G---HK---eNK ATAKK--F-FYSNIM-NFFKKD-- | 1041 |
| WP_019312892 | 982 | HHAHDAYLNAVIGKALLGVYPQL-EPEFVYGDYPHFH- G---HK---eNK ATAKK--F-FYSNIM-NFFKKD-- | 1041 |
| WP_019313659 | 982 | HHAHDAYLNAVIGKALLGVYPQL-EPEFVYGDYPHFH- G---HK---eNK ATAKK--F-FYSNIM-NFFKKD-- | 1041 |
| WP_019314093 | 982 | HHAHDAYLNAVIGKALLGVYPQL-EPEFVYGDYPHFH- G---HE---eNK ATAKK--F-FYSNIM-NFFKKD-- | 1041 |
| WP_019315370 | 982 | HHAHDAYLNAVIGKALLGVYPQL-EPEFVYGDYPHFH- G---HK---eNK ATAKK--F-FYSNIM-NFFKKD-- | 1041 |
| WP_019803776 | 982 | HHAHDAYLNAVIGKALLGVYPQL-EPEFVYGDYPHFH- G---HK---eNK ATAKK--F-FYSNIM-NFFKKD-- | 1041 |
| WP_019805234 | 982 | HHAHDAYLNAVIGKALLGVYPQL-EPEFVYGDYPHFH- G---HK---eNK ATAKK--F-FYSNIM-NFFKKD-- | 1041 |
| WP_024783594 | 982 | HHAHDAYLNAVIGKALLGVYPQL-EPEFVYGDYPHFH- G---HK---eNK ATAKK--F-FYSNIM-NFFKKD-- | 1041 |
| WP_024784288 | 984 | HHAHDAYLNAVIGKALLGVYPQL-EPEFVYGDYPHFH- S---YR---eRK ATQKM--F-FYSNIM-NMFKSKVK | 1046 |
| WP_024784666 | 982 | HHAHDAYLNAVIGKALLGVYPQL-EPEFVYGDYPHFH- G---HK---eNK ATAKK--F-FYSNIM-NFFKKD-- | 1041 |
| WP_024784894 | 982 | HHAHDAYLNAVIGKALLGVYPQL-EPEFVYGDYPHFH- G---HK---eNK ATAKK--F-FYSNIM-NFFKKD-- | 1041 |
| WP_024786433 | 984 | HHAHDAYLNAVIGKALLGVYPQL-EPEFVYGDYPHFH- S---YR---eRK ATQKM--F-FYSNIM-NMFKSKVK | 1046 |
| WP_049473442 | 982 | HHAHDAYLNAVIGKALLGVYPQL-EPEFVYGDYPHFH- G---HE---eNK ATAKK--F-FYSNIM-NFFKKD-- | 1041 |
| WP_049474547 | 982 | HHAHDAYLNAVIGKALLGVYPQL-EPEFVYGDYPHFH- G---HK---eNK ATAKK--F-FYSNIM-NFFKKD-- | 1041 |
| EMC03581 | 975 | HHAHDAYLNAVIGKALLGVYPQL-EPEFVYGDYPHFH- G---HK---eNK ATAKK--F-FYSNIM-NFFKKD-- | 1034 |
| WP_000428612 | 987 | HHAHDAYLNAVVAKAILKKYPKL-EPEFVYGDYQKYDL SkdpKEI---EK ATEKY--F-FYSNLL-NFFKEEVH | 1058 |
| WP_000428613 | 985 | HHAHDAYLNAVVAKAILKKYPKL-EPEFVYGDYQKYDL SrnpKEV---EK ATEKY--F-FYSNLL-NFFKEEVH | 1056 |
| WP_049523028 | 980 | HHAHDAYLNAVVAKAILKKYPKL-EPEFVYGDYQKYDL TkdpKEI---EK ATEKY--F-FYSNLL-NFFKDKVY | 1051 |
| WP_003107102 | 951 | HHAHDAYLNAVVGTALLKKYPKL-EAEFVYGDYKHYDL S---DTSl--GK ATAKM--F-FYSNIM-NFFKKEVR | 1020 |
| WP_054279288 | 983 | HHAHDAYLNAVVGTALLKKYPKL-ASEFVYGDYQKYDL S---GKAs--GK ATAKY--F-FYSNLM-NFFKSEVK | 1052 |
| WP_049531101 | 985 | HHAHDAYLNAVVAKAILKKYPKL-EPEFVYGDYQKYDL SrdpKEI---EK ATEKY--F-FYSNLL-NFFKEEVH | 1056 |
| WP_049538452 | 985 | HHAHDAYLNAVVAKAILKKYPKL-EPEFVYGDYQKYDL SkdpKDI---EK ATEKY--F-FYSNLL-NFFKEEVH | 1056 |
| WP_049549711 | 987 | HHAHDAYLNAVVAKAILKKYPKL-EPEFVYGDYQKNDL SkdpKDI---EK ATEKY--F-FYSNLL-NFFKEEVH | 1058 |
| WP_007896501 | 988 | HHAHDAYLNAVVGTALLKKYPKL-EAEFVYGDYKHFDL S---DPSl--GK ATAKV--F-FYSNIM-NFFKEELS | 1057 |
| EFR44625 | 940 | HHAHDAYLNAVVGTALLKKYPKL-EAEFVYGDYKHFDL S---DPSl--GK ATAKV--F-FYSNIM-NFFKEELS | 1009 |
| WP_002897477 | 984 | HHAHDAYLNAVVAKAILKKYPKL-EPEFVYGDYQKYDL FkpsKEI---EK ATEKY--F-FYSNLL-NFFKEEVL | 1055 |
| WP_002906454 | 984 | HHAHDAYLNAVVAKAILKKYPKL-EPEFVYGDYQKYDL SkasNTI---EK ATEKY--F-FYSNLL-NFFKEEVR | 1055 |
| WP_009729476 | 985 | HHAHDAYLNAVVAKAILKKYPKL-EPEFVYGDYQKYDL SkdpKEI---EK ATEKY--F-FYSNLL-NFFKEEVH | 1056 |
| CQR24647 | 984 | HHAHDAYLNAVVAKALLIRYPKL-EPEFVYGEYPKYN- S---YRE---EK ATEKM--F-FYSNIM-NMFKTTIK | 1046 |
| WP_000066813 | 989 | HHAHDAYLNAVLAKAILKKYPKL-EPEFVYGDYQKYDL SrepKEV---EK ATQKY--F-FYSNLL-NFFKEEVH | 1060 |
| WP_009754323 | 985 | HHAHDAYLNAVVAKAILKKYPKL-EPEFVYGDYQKYDL SkdpKEI---EK ATEKY--F-FYSNLL-NFFKEEVH | 1056 |
| WP_044674937 | 986 | HHAHDAYLNAVVATALLKKYPQL-APEFVYGDYPKYN- S---YKS---EK ATEKV--L-FYSNIM-NFFRRVLV | 1048 |
| WP_044676715 | 988 | HHAHDAYLNAVVATALLKKYPQL-APEFVYGDYPKYN- S---YKS---EK ATEKV--L-FYSNIM-NFFRRVLV | 1050 |
| WP_044680361 | 988 | HHAHDAYLNAVVATALLKKYPQL-APEFVYGDYPKYN- S---YKS---EK ATEKV--L-FYSNIM-NFFRRVLV | 1050 |
| WP_044681799 | 986 | HHAHDAYLNAVVATALLKKYPQL-APEFVYGDYPKYN- S---YKS---EK ATEKV--L-FYSNIM-NFFRRVLV | 1048 |
| WP_049533112 | 981 | HHAHDAYLNAVIGTALLKKYPKL-ASEFVYGEFKKYDV S---DK---eIG KATAK--YfFYSNLM-NFFKKEVK | 1050 |
| WP_029090905 | 952 | HHAQDAFLVAFLGTNITSNYPKI-EMEYLFKGYQHYLN ------Ev--GK AAKPKftF-IVENLS--------- | 1007 |
| WP_006506696 | 977 | HHAHDAYIVALIGGFMRDRYPNMhDSKAVYSEYMKMGR ----NKNd--QK -----G---FVINSM-NYPY-EV- | 1038 |
| AIT42264 | 982 | HHAHDAYLNAVVGTALIKKYPKL-ESEFVYGDYKVYDV S---EQEi--GK ATAKY--F-FYSNIM-NFFKTEIT | 1051 |
| WP_034440723 | 981 | HHAHDAYLNGVIALKLLELYPYM-AKDLIYGKYSYHRK G---------DK ATQAK--Y-KMSNII-ERFSQDL- | 1041 |
| AKQ21048 | 982 | HHAHDAYLNAVVGTALIKKYPKL-ESEFVYGDYKVYDV S---EQEi--GK ATAKY--F-FYSNIM-NFFKTEIT | 1051 |
| WP_004636532 | 981 | HHGHDAYLNAVVATTIMKVYPNL-KPQFVYGQYKKTSM ----FKE---EK ATARK--H-FYSNIT-KFFKKEKV | 1042 |
| WP_002364836 | 988 | HHGQDAYLNCVVATTLLKVYPNL-APEFVYGEYPKFQT ----FKE---EK ATAKA--I-IYTNLL-RFFTED-- | 1047 |
| WP_016631044 | 939 | HHGQDAYLNCVVATTLLKVYPNL-APEFVYGEYPKFQT ----FKE---NK ATAKA--I-IYTNLL-RFFTED-- | 998 |
| EMS75795 | 723 | HHAHDAYLNGVVAIALLKKYPKL-EPEFVYGNYTKENL ----AT---eNK ATAKK--E-FYSNIL-RFFEKE-- | 782 |
| WP_002373311 | 988 | HHGQDAYLNCVVATTLLKVYPNL-APEFVYGEYPKFQA ----FKE---NK ATAKT--I-IYTNLM-RFFTED-- | 1047 |
| WP_002378009 | 988 | HHGQDAYLNCVVATTLLKVYPNL-APEFVYGEYPKFQT ----FKE---NK ATAKA--I-IYTNLL-RFFTED-- | 1047 |
| WP_002407324 | 988 | HHGQDAYLNCVVATTLLKVYPNL-APEFVYGEYPKFQT ----FKE---NK ATAKA--I-IYTNLL-RFFTED-- | 1047 |
| WP_002413717 | 988 | HHGQDAYLNCVVATTLLKVYPNL-APEFVYGEYPKFQT ----FKE---NK ATAKA--I-IYTNLL-RFFTED-- | 1047 |
| WP_010775580 | 990 | HHGQDAYLNCVVATTLLKVYPNL-APEFVYGEYPKFQA ----FKE---NK ATAKA--I-IYTNLL-RFFTED-- | 1049 |
| WP_010818269 | 988 | HHGQDAYLNCVVATTLLKVYPNL-APEFVYGEYPKFQT ----FKE---NK ATAKA--I-IYTNLL-RFFTED-- | 1047 |
| WP_010824395 | 988 | HHGQDAYLNCVVATTLLKVYPNL-APEFVYGEYPKFQT ----FKE---NK ATAKT--I-IYTNLM-RFFTED-- | 1047 |
| WP_016622645 | 988 | HHGQDAYLNCVVATTLLKVYPNL-APEFVYGEYPKFQT ----FKE---NK ATAKA--I-IYTNLL-RFFTED-- | 1047 |
| WP_033624816 | 988 | HHGQDAYLNCVVATTLLKVYPNL-APEFVYGEYPKFQA ----FKE---NK AMAKA--I-IYTNLL-RFFTED-- | 1047 |
| WP_033625576 | 988 | HHGQDAYLNCVVATTLLKVYPNL-APEFVYGEYPKFQA ----FKE---NK ATAKA--I-IYTNLM-RFFTEV-- | 1047 |
| WP_033789179 | 988 | HHGQDAYLNCVVATTLLKVYPNL-APEFVYGEYPKFQA ----FKE---NK ATAKA--I-IYTNLL-RFFTED-- | 1047 |
| WP_002310644 | 989 | HHAHDAYLNGVVALALLKKYPQL-APEFVYGEYLKFNA ----HK---aNK ATVKK--E-FYSNIM-KFFESD-- | 1048 |
| WP_002312694 | 990 | HHAHDAYLNGVVALALLKKYPQL-APEFVYGEYLKFNA ----HK---aNK ATVKK--E-FYSNIM-KFFESD-- | 1049 |
| WP_002314015 | 990 | HHAHDAYLNGVVALALLKKYPQL-APEFVYGEYLKFNA ----HK---aNK ATVKK--E-FYSNIM-KFFESD-- | 1049 |
| WP_002320716 | 990 | HHAHDAYLNGVVALALLKKYPQL-APEFVYGEYLKFNA ----HK---aNK ATVKK--E-FYSNIM-KFFESD-- | 1049 |
| WP_002330729 | 989 | HHAHDAYLNGVVALALLKKYPQL-APEFVYGEYLKFNA ----HK---aNK ATVKK--E-FYSNIM-KFFESD-- | 1048 |
| WP_002335161 | 990 | HHAHDAYLNGVVALALLKKYPQL-APEFVYGEYLKFNA ----HK---aNK ATVKK--E-FYSNIM-KFFESD-- | 1049 |
| WP_002345439 | 990 | HHAHDAYLNGVVALALLKKYPQL-APEFVYGEYLKFNA ----HK---aNK ATVKK--E-FYSNIM-KFFESD-- | 1049 |
| WP_034867970 | 980 | HHAHDAYLNGFIANVLLKRYPKL-APEFVYGKYVKYSL ----AR---eNK ATAKK--E-FYSNIL-KFLESD-- | 1039 |
| WP_047937432 | 990 | HHAHDAYLNGVIALALLKKYPQL-APEFVYGEYLKFNA ----HK---aNK ATVKK--E-FYSNIM-KFFESD-- | 1049 |
| WP_010720994 | 980 | HHAHDAYLNGFIANVLLKRYPKL-APEFVYGKYVKYSL ----AR---eNK ATAKK--E-FYSNIL-KFLESD-- | 1039 |
| WP_010737004 | 980 | HHAHDAYLNGFIANVLLKRYPKL-APEFVYGKYVKYSL ----AR---eNK ATAKK--E-FYSNIL-KFLESD-- | 1039 |
| WP_034700478 | 980 | HHAHDAYLNGFIANVLLKRYPKL-APEFVYGKYVKYSL ----AR---eNK ATAKK--E-FYSNIL-KFLESD-- | 1039 |
| WP_007209003 | 978 | HHAHDAYLNAVVALSLLRVYPQL-KPEFVYGEYGKNS- ----IHDq--NK ATIKK---qFYSNIT-RYFASK-- | 1037 |
| WP_023519017 | 974 | HHAHDAYLNGVVAMTLLKKYPKL-APEFVYGSYIKGDI ----NQ---iNK ATAKK--E-FYSNIM-KFFESE-- | 1033 |
| WP_010770040 | 986 | HHGHDAYLNGVVANSLLRVYPQL-QPEFVYGDYPKENA ----YKA---NK ATAKK--Q-LYTNIM-KFFAED-- | 1045 |
| WP_048604708 | 983 | HHAHDAYLNGVVATALLKIYPOL-EPEFVYGEFHRFNA ----FKE---NK ATAKK--Q-FYSNLM-EFSKSD-- | 1042 |
| WP_010750235 | 983 | HHAHDAYLNAVVALALLKKYPRL-APEFVYGSFAKFHL ----VK---eNK ATAKK--E-FYSNIL-KFFEKE-- | 1042 |
| AII16583 | 1021 | HHAHDAYLNAVVGTALIKKYPKL-ESEFVYGDYKVYDV S---EQEi--GK ATAKY--F-FYSNIM-NFFKTEIT | 1090 |
| WP_029073316 | 988 | HHAHDAYIATILGTYIGHRFESL-DAKYIYGEYQKIFR ----NKNk--DK ---KDg---FILNSM-RNLYADK- | .052 |
| WP_031589969 | 988 | HHAHDAYIATILGTYIGHRFESL-DAKYIYGEYKRIFR ----QKNk--GK ---NDg---FILNSM-RNIYADK- | 1052 |
| KDA45870 | 973 | HHAHDAYLNAVVANLIMAKYPEL-EPEFVYGKYRKTK- ----FKG1--GK ATAKN---tLYANVL-YELKENEV | 1034 |
| WP_039099354 | 991 | HHAFDAYLTAFVGLYLLKRYPKL-KPYFVYGEYQKAS- ----QQ----DK ---RN--F----NFL-NGLKKD-- | 1043 |
| AKP02966 | 1000 | HHAQDAYLASFLGTYRLRRFPTD-EMLLMNGEYNKFYG -----KElysKK -SRKN-gF-IISPLV--------- | 1062 |
| WP_010991369 | 985 | HHAHDAYLNGVVANTLLKVYPQL-EPEFVYGDYHQFDW ----FKA---NK ATAKK--Q-FYTNIM-LFFAQK-- | 1044 |
| WP_033838504 | 985 | HHAHDAYLNGVVANTLLKVYPQL-EPEFVYGDYHQFDW ----FKA---NK ATAKK--Q-FYTNIM-LFFAQK-- | 1044 |
| EHN60060 | 988 | HHAHDAYLNGVVANTLLKVYPQL-EPEFVYGDYHQFDW ----FKA---NK ATAKK--Q-FYTNIM-LFFAQK-- | 1047 |
| EFR89594 | 754 | HHAHDAYLNGVVANTLLKVYPQL-EPEFVYGDYHQFDW ----FKA---NK ATAKK--Q-FYTNIM-LFFAQK-- | 813 |
| WP_038409211 | 985 | HHAHDAYLNGVVANTLLKVYPOL-EPEFVYGDYHOFDW ----FKA---NK ATAKK--Q-FYTNIM-RFFAKE-- | 1044 |
| EFR95520 | 604 | HHAHDAYLNGVVANTLLKVYPQL-EPEFVYGDYHOFDW ----FKA---NK ATAKK--Q-FYTNIM-RFFAKE-- | 663 |
| WP_003723650 | 985 | HHAHDAYLNGVVANTLLKVYPQL-EPEFVYGEYHQFDW ----FKA---NK ATAKK--Q-FYTNIM-LFFAQK-- | 1044 |
| WP_003727705 | 985 | HHAHDAYLNGVVANTLLKVYPOL-EPEFVYGEYHQFDW ----FKA---NK ATAKK--Q-FYTNIM-LFFAQK-- | 1044 |
| WP_003730785 | 985 | HHAHDAYLNGVVANTLLKVYPQL-EPEFVYGEYHQFDW ----FKA---NK ATAKK--Q-FYTNIM-LFFAQK-- | 1044 |
| WP_003733029 | 985 | HHAHDAYLNGVVANTLLKVYPQL-EPEFVYGEYHQFGW ----FKA---NK ATAKK--Q-FYTNIM-LFFAQK-- | 1044 |
| WP_003739838 | 985 | HHAHDAYLNGVVANTLLKVYPQL-EPEFVYGEYHQFDW ----FKA---NK ATAKK--Q-FYTNIM-LFFAQK-- | 1044 |
| WP_014601172 | 985 | HHAHDAYLNGVVANTLLKVYPOL-EPEFVYGEYHQFDW ----FKA---NK ATAKK--Q-FYTNIM-LFFGQK-- | 1044 |
| WP_023548323 | 985 | HHAHDAYLNGVVANTLLKVYPQL-EPEFVYGEYHQFDW ----FKA---NK ATAKK--Q-FYTNIM-LFFAQK-- | 1044 |
| WP_031665337 | 985 | HHAHDAYLNGVVANTLLKVYPQL-EPEFVYGEYHQFDW ----FKA---NK ATAKK--Q-FYTNIM-LFFAQK-- | 1044 |
| WP_031669209 | 985 | HHAHDAYLNGVVANTLLKVYPQL-EPEFVYGEYHQFDW ----FKA---NK ATAKK--Q-FYTNIM-LFFAQK-- | 1044 |
| WP_033920898 | 985 | HHAHDAYLNGVVANTLLKVYPQL-EPEFVYGEYHQFDW ----FKA---NK ATAKK--Q-FYTNIM-LFFAQK-- | 1044 |
| AKI42028 | 988 | HHAHDAYLNGVVANTLLKVYPQL-EPEFVYGEYHQFDW ----FKA---NK ATAKK--Q-FYTNIM-LFFGQK-- | 1047 |
| AKI50529 | 988 | HHAHDAYLNGVVANTLLKVYPQL-EPEFVYGEYHQFDW ----FKA---NK ATAKK--Q-FYTNIM-LFFAQK-- | 1047 |
| EFR83390 | 433 | HHAHDAYLNGVVANTLLKVYPQL-EPEFVYGEYHQFDW ----FKA---NK ATAKK--Q-FYTNIM-LFFAQK-- | 492 |
| WP_046323366 | 985 | HHAHDAYLNCVVANTLLKVYPQL-EPEFVYGDYHQFDW ----FKA---NK ATAKK--Q-FYTNIM-LFFAKK-- | 1044 |
| AKE81011 | 998 | HHAHDAYLNAVVGTALIKKYPKL-ESEFVYGDYKVYDV S---EQEi--GK ATAKY--F-FYSNIM-NFFKTEIT | 1067 |
| CUO82355 | 981 | HHAHDAYIVALIGGFMRDRYPNMhDSKAVYSEYMKMER ----NKNd--QK -----g---FVINSM-NYPY-EV- | 1042 |
| WP_033162887 | 983 | HHAHDAYIACIVGQFMHONFEHL-DAKIIYGQYK---- -----KNy--KK ---NYg---FILNSM-NHLQSDI- | 1042 |
| AGZ01981 | 1015 | HHAHDAYLNAVVGTALIKKYPKL-ESEFVYGDYKVYDV S---EQEi--GK ATAKY--F-FYSNIM-NFFKTEIT | 1084 |
| AKA60242 | 982 | HHAHDAYLNAVVGTALIKKYPKL-ESEFVYGDYKVYDV S---EQEi--GK ATAKY--F-FYSNIM-NFFKTEIT | 1051 |
| AKS40380 | 982 | HHAHDAYLNAVVGTALIKKYPKL-ESEFVYGDYKVYDV S---EQEi--GK ATAKY--F-FYSNIM-NFFKTEIT | 1051 |
| 4UN5_B | 986 | HHAHDAYLNAVVGTALIKKYPKL-ESEFVYGDYKVYDV S---EQEi--GK ATAKY--F-FYSNIM-NFFKTEIT | 1055 |
| WP_010922251 | 1052 | [chemical structure] | 1114 |
| WP_039695303 | 1059 | YAD-GTVFERPIIE T-NAD-GE-IAWNKQIDFEKVRKVLS-YPQVNIVKKVETQT GGFSK ESIL-PKG- | 1120 |
| WP_045635197 | 1056 | YAD-GTIVKRENIE Y-SKDtGE-IAWNKEKDFAIIKKVLS-LPQVNIVKKREVQT GGFSK ESIL-PKG- | 1118 |
| 5AXW_A | 772 | YKYSHRVDKKPNRE VNNLN-GL---YDKDND--KLKKLINKSPEKLLMYHHDPQT --YQK KLIMeQYGd | 852 |
| WP_009880683 | 736 | LAN-GEIRKRPLIE TNGET-GE-IVWDKGRDFATVRKVLS-MPQVNIVKKTEVQT GGFSK ESIL-PKR- | 798 |
| WP_010922251 | 1052 | LAN-GEIRKRPLIE TNGET-GE-IVWDKGRDFATVRKVLS-MPQVNIVKKTEVQT GGFSK ESIL-PKR- | 1114 |
| WP_011054416 | 1052 | LAN-GEIRKRPLIE TNGET-GE-IVWDKGRDFATVRKVLS-MPQVNIVKKTEVQT GGFSK ESIL-PKR- | 1114 |
| WP_011284745 | 1052 | LAN-GEIRKRPLIE TNGET-GE-IVWDKGRDFATVRKVLS-MPQVNIVKKTEVQT GGFSK ESIL-PKR- | 1114 |
| WP_011285506 | 1052 | LAN-GEIRKRPLIE TNGET-GE-IVWDKGRDFATVRKVLS-MPQVNIVKKTEVQT GGFSK ESIL-PKR- | 1114 |
| WP_011527619 | 1052 | LAN-GEIRKRPLIE TNGET-GE-IVWDKGRDFATVRKVLS-MPQVNIVKKTEVQT GGFSK ESIL-PKR- | 1114 |
| WP_012560673 | 1052 | LAN-GEIRKRPLIE TNGET-GE-IVWDKGRDFATVRKVLS-MPQVNIVKKTEVQT GGFSK ESIL-PKR- | 1114 |
| WP_014407541 | 1051 | LAN-GEIRKRPLIE TNGET-GE-IVWDKGRDFATVRKVLS-MPQVNIVKKTEVQT GGFSK ESIL-PKR- | 1113 |
| WP_020905136 | 1052 | LAN-GEIRKRPLIE TNGET-GE-IVWDKGRDFATVRKVLS-MPQVNIVKKTEVQT GGFSK ESIL-PKR- | 1114 |
| WP_023080005 | 1051 | LAN-GEIRKRPLIE TNGET-GE-IVWDKGRDFATVRKVLS-MPQVNIVKKTEVQT GGFSK ESIL-PKR- | 1113 |
| WP_023610282 | 1051 | LAN-GEIRKRPLIE TNGET-GE-IVWDKGRDFATVRKVLS-MPQVNIVKKTEVQT GGFSK ESIL-PKR- | 1113 |
| WP_030125963 | 1052 | LAN-GEIRKRPLIE TNGET-GE-IVWDKGRDFATVRKVLS-MPQVNIVKKTEVQT GGFSK ESIL-PKR- | 1114 |
| WP_030126706 | 1052 | LAN-GEIRKRPLIE TNGET-GE-IVWDKGRDFATVRKVLS-MPQVNIVKKTEVQT GGFSK ESIL-PKR- | 1114 |
| WP_031488318 | 1052 | LAN-GEIRKRPLIE TNGET-GE-IVWDKGRDFATVRKVLS-MPQVNIVKKTEVQT GGFSK ESIL-PKR- | 1114 |
| WP_032460140 | 1052 | LAN-GEIRKRPLIE TNGET-GE-IVWDKGRDFATVRKVLS-MPQVNIVKKTEVQT GGFSK ESIL-PKR- | 1114 |
| WP_032461047 | 1052 | LAN-GEIRKRPLIE TNGET-GE-IVWDKGRDFATVRKVLS-MPQVNIVKKTEVQT GGFSK ESIL-PKR- | 1114 |
| WP_032462016 | 1052 | LAN-GEIRKRPLIE TNGET-GE-IVWDKGRDFATVRKVLS-MPQVNIVKKTEVQT GGFSK ESIL-PKR- | 1114 |
| WP_032462936 | 1052 | LAN-GEIRKRPLIE TNGET-GE-IVWDKGRDFATVRKVLS-MPQVNIVKKTEVQT GGFSK ESIL-PKR- | 1114 |
| WP_032464890 | 1052 | LAN-GEIRKRPLIE TNGET-GE-IVWDKGRDFATVRKVLS-MPQVNIVKKTEVQT GGFSK ESIL-PKR- | 1114 |
| WP_033888930 | 877 | LAN-GEIRKRPLIE TNGET-GE-IVWDKGRDFATVRKVLS-MPQVNIVKKTEVQT GGFSK ESIL-PKR- | 939 |
| WP_038431314 | 1052 | LAN-GEIRKRPLIE TNGET-GE-IVWDKGRDFATVRKVLS-MPQVNIVKKTEVQT GGFSK ESIL-PKR- | 1114 |
| WP_038432938 | 1051 | LAN-GEIRKRPLIE TNGET-GE-IVWDKGRDFATVRKVLS-MPQVNIVKKTEVQT GGFSK ESIL-PKR- | 1113 |
| WP_038434062 | 1052 | LAN-GEIRKRPLIE TNGET-GE-IVWDKGRDFATVRKVLS-MPQVNIVKKTEVQT GGFSK ESIL-PKR- | 1114 |
| BAQ51233 | 963 | LAN-GEIRKRPLIE TNGET-GE-IVWDKGRDFATVRKVLS-MPQVNIVKKTEVQT GGFSK ESIL-PKR- | 1025 |
| KGE60162 | 227 | LAN-GEIRKRPLIE TNGET-GE-IVWDKGRDFATVRKVLS-MPQVNIVKKTEVQT GGFSK ESIL-PKR- | 289 |
| KGE60856 | 1 | ------------IE TNGET-GE-IVWDKGRDFATVRKVLS-MPQVNIVKKTEVQT GGFSK ESIL-PKR- | 52 |
| WP_002989955 | 1052 | LAN-GEIRKRPLIE TNGET-GE-IVWDKGRDFATVRKVLS-MPQVNIVKKTEVQT GGFSK ESIL-PKR- | 1114 |
| WP_003030002 | 1042 | -----------DIQ T-NED-GE-IAWNKEKHIKILRKVLS-YPQVNIVKKTEEQT GGFSK ESIL-PKG- | 1093 |
| WP_003065552 | 1059 | YSN-GKVIVRPVVE Y-SKD-TEdIAWDKKSNFRTICKVLS-YPQVNIVKKVETOT GGFSK ESIL-PKG- | 1121 |
| WP_001040076 | 1050 | LAD-GTVVVKDDIE VNNDT-GE-IVWDKKKHFATVRKVLS-YPQVNIVKKTEIQT GGFSK ESIL-AHG- | 1112 |
| WP_001040078 | 1058 | LAD-GSIVVRPVIE TGRYM-GK-TAWDKKKHFATVRKVLS-YPQVNIVKKTEIQT GGFSK ESIL-AHG- | 1120 |
| WP_001040080 | 1050 | LAD-GTVVVKDDIE VNNDT-GE-IVWDKKKHFATVRKVLS-YPONNIVKKTEIQT GGFSK ESIL-AHG- | 1112 |
| WP_001040081 | 1050 | LAD-GTVVVKDDIE VNNDT-GE-IVWDKKKHFATVRKVLS-YPQNNIVKKTEIQT GGFSK ESIL-AHG- | 1112 |
| WP_001040083 | 1050 | LAD-GTVVVKDDIE VNNDT-GE-IVWDKKKHFATVRKVLS-YPONNIVKKTEIQT GGFSK ESIL-AHG- | 1112 |
| WP_001040085 | 1050 | LAD-GTVVVKDDIE VNNDT-GE-IVWDKKKHFATVRKVLS-YPONNIVKKTEIQT GGFSK ESIL-AHG- | 1112 |
| WP_001040087 | 1050 | LAD-GTVVVKDDIE VNNDT-GE-IVWDKKKHFATVRKVLS-YPQNNIVKKTEIQT GGFSK ESIL-AHG- | 1112 |
| WP_001040088 | 1050 | LAD-GTVVVKDDIE VNNDT-GE-IVWDKKKHFATVRKVLS-YPQNNIVKKTEIQT GGFSK ESIL-AHG- | 1112 |
| WP_001040089 | 1050 | LAD-GTVVVKDDIE VNNDT-GE-IVWDKKKHFATVRKVLS-YPONNIVKKTEIQT GGFSK ESIL-AHG- | 1112 |
| WP_001040090 | 1050 | LAD-GTVVVKDDIE VNNDT-GE-IVWDKKKHFATVRKVLS-YPQNNIVKKTEIQT GGFSK ESIL-AHG- | 1112 |
| WP_001040091 | 1050 | LAD-GTVVVKDDIE VNNDT-GE-IVWDKKKHFATVRKVLS-YPQNNIVKKTEIQT GGFSK ESIL-AHG- | 1112 |
| WP_001040092 | 1050 | LAD-ETVVVKDDIE VNNET-GE-IAWDKKKHFATVRKVLS-YPQVNIVKKTEVQT GGFSK ESIL-AHS- | 1112 |
| WP_001040094 | 1050 | LAD-GTVVVKDDIE VNNDT-GE-IVWDKKKHFATVRKVLS-YPQVNIVKKTEIQT GGFSK ESIL-AHG- | 1112 |
| WP_001040095 | 1050 | LAD-GTVVVKDDIE VNNDT-GE-IVWDKKKHFATVRKVLS-YPQVNIVKKTEVQT GGFSK ESIL-AHG- | 1112 |
| WP_001040096 | 1050 | LAD-GTVVVKDDIE VNNDT-GE-IVWDKKKHFATVRKVLS-YPQVNIVKKTEVQT GGFSK ESIL-AHG- | 1112 |
| WP_001040097 | 1050 | LAD-GTVVVKDDIE VNNDT-GE-IVWDKKKHFATVRKVLS-YPQVNIVKKTEIQT GGFSK ESIL-AHG- | 1112 |
| WP_001040098 | 1050 | LAD-GTVVVKDDIE VNNDT-GE-IVWDKKKHFATVRKVLS-YPQVNIVKKTEIQT GGFSK ESIL-AHG- | 1112 |
| WP_001040099 | 1050 | LAD-GTVVVKDDIE VNNDT-GE-IVWDKKKHFATVRKVLS-YPQVNIVKKTEIQT GGFSK ESIL-AHG- | 1112 |
| WP_001040100 | 1050 | LAD-GTVVVKDDIE VNNDT-GE-IVWDKKKHFATVRKVLS-YPQVNIVKKTEIQT GGFSK ESIL-AHG- | 1112 |
| WP_001040104 | 1050 | LAD-GTVVVKDDIE VNNDT-GE-IVWDKKKHFATVRKVLS-YPONNIVKKTEIQT GGFSK ESIL-AHG- | 1112 |
| WP_001040105 | 1050 | LAD-GTVVVKDDIE VNNDT-GE-IVWDKKKHFATVRKVLS-YPQNNIVKKTEIQT GGFSK ESIL-AHG- | 1112 |
| WP_001040106 | 1050 | LAD-GTVVVKDDIE VNNDT-GE-IVWDKKKHFATVRKVLS-YPQVNIVKKTEIQT GGFSK ESIL-AHG- | 1112 |
| WP_001040107 | 1050 | LAD-GTVVVKDDIE VNNDT-GE-IVWDKKKHFATVRKVLS-YPQVNIVKKTEIQT GGFSK ESIL-AHG- | 1112 |
| WP_001040108 | 1050 | LAD-GTVVVKDDIE VNNDT-GE-IVWDKKKHFATVRKVLS-YPQVNIVKKTEIQT GGFSK ESIL-AHG- | 1112 |
| WP_001040109 | 1050 | LAD-GTVVVKDDIE VNNDT-GE-IVWDKKKHFATVRKVLS-YPQVNIVKKTEIQT GGFSK ESIL-AHG- | 1112 |
| WP_001040110 | 1050 | LAD-GTVVVKDDIE VNNDT-GE-IVWDKKKHFATVRKVLS-YPQVNIVKKTEIQT GGFSK ESIL-AHG- | 1112 |
| WP_015058523 | 1050 | LAD-ETVVVKDDIE VNNET-GE-IAWDKKKHFATVRKVLS-YPQVNIVKKTEVQT GGFSK ESIL-AHS- | 1112 |
| WP_017643650 | 1050 | LAD-GTVVVKDDIE VNNDT-GE-IVWDKKKHFATVRKVLS-YPQVNIVKKTEIQT GGFSK ESIL-AHG- | 1112 |
| WP_017647151 | 1050 | LAD-GTVVVKDDIE VNNDT-GE-IVWDKKKHFATVRKVLS-YPQVNIVKKTEIQT GGFSK ESIL-AHG- | 1112 |
| WP_017648376 | 1050 | LAD-GTVVVKDDIE VNNDT-GE-IVWDKKKHFATVRKVLS-YPQVNIVKKTEIQT GGFSK ESIL-AHG- | 1112 |
| WP_017649527 | 1050 | LAD-GTVVVKDDIE VNNDT-GE-IVWDKKKHFATVRKVLS-YPONNIVKKTEIQT GGFSK ESIL-AHG- | 1112 |
| WP_017771611 | 1050 | LAD-GTVVVKDDIE VNNDT-GE-IVWDKKKHFATVRKVLS-YPQVNIVKKTEIQT GGFSK ESIL-AHG- | 1112 |
| WP_017771984 | 1050 | LAD-GTVVVKDDIE VNNDT-GE-IVWDKKKHFATVRKVLS-YPQNNIVKKTEIQT GGFSK ESIL-AHG- | 1112 |
| CFQ25032 | 1050 | LAD-GTVVVKDDIE VNNDT-GE-IVWDKKKHFATVRKVLS-YPQNNIVKKTEIQT GGFSK ESIL-AHG- | 1112 |
| CFV16040 | 1050 | LAD-GTVVVKDDIE VNNDT-GE-IVWDKKKHFATVRKVLS-YPONNIVKKTEIQT GGFSK ESIL-AHG- | 1112 |
| KLJ37842 | 1050 | LAD-GTVVVKDDIE VNNDT-GE-IVWDKKKHFATVRKVLS-YPQNNIVKKTEIQT GGFSK ESIL-AHG- | 1112 |
| KLJ72361 | 1050 | LAD-GTVVVKDDIE VNNDT-GE-IVWDKKKHFATVRKVLS-YPQNNIVKKTEIQT GGFSK ESIL-AHG- | 1112 |
| KLL20707 | 1064 | LAD-GTVVVKDDIE VNNDT-GE-IVWDKKKHFATVRKVLS-YPONNIVKKTEIQT GGFSK ESIL-AHG- | 1126 |
| KLL42645 | 1050 | LAD-GTVVVKDDIE VNNDT-GE-IVWDKKKHFATVRKVLS-YPQVNIVKKTEIQT GGFSK ESIL-AHG- | 1112 |
| WP_047207273 | 1050 | LAD-GTVVVKDDIE VNNDT-GE-IVWDKKKHFATVRKVLS-YPQNNIVKKTEIQT GGFSK ESIL-AHG- | 1112 |
| WP_047209694 | 1050 | LAD-GTVVVKDDIE VNNDT-GE-IVWDKKKHFATVRKVLS-YPQVNIVKKTEIQT GGFSK ESIL-AHG- | 1112 |
| WP_050198062 | 1050 | LAD-GTVVIKDDIE VNNDT-GE-IVWDKKKHFATVRKVLS-YPQNNIVKKTEIQT GGFSK ESIL-AHG- | 1112 |
| WP_050201642 | 1050 | LAD-GTVVVKDDIE VNNDT-GE-IVWDKKKHFATVRKVLS-YPQNNIVKKTEIQT GGFSK ESIL-AHG- | 1112 |
| WP_050204027 | 1050 | LAD-GTVVVKDDIE VNNDT-GE-IVWDKKKHFATVRKVLS-YPQVNIVKKTEIQT GGFSK ESIL-AHG- | 1112 |
| WP_050881965 | 1050 | LAD-GTVVVKDDIE VNNDT-GE-IVWDKKKHFATVRKVLS-YPONNIVKKTEIQT GGFSK ESIL-AHG- | 1112 |
| WP_050886065 | 1050 | LAD-GTVVVKDDIE VNNDT-GE-IVWDKKKHFATVRKVLS-YPQNNIVKKTEIQT GGFSK ESIL-AHG- | 1112 |
| AHN30376 | 1050 | LAD-ETVVVKDDIE VNNET-GE-IAWDKKKHFATVRKVLS-YPQVNIVKKTEVQT GGFSK ESIL-AHS- | 1112 |
| EAO78426 | 1050 | LAD-GTVVVKDDIE VNNDT-GE-IVWDKKKHFATVRKVLS-YPQNNIVKKTEIQT GGFSK ESIL-AHG- | 1112 |
| CCW42055 | 1050 | LAD-GTVVVKDDIE VNNDT-GE-IVWDKKKHFATVRKVLS-YPQNNIVKKTEIQT GGFSK ESIL-AHG- | 1112 |
| WP_003041502 | 1051 | FAD-GTVVERPDIE T-SED-GE-IAWNKQTDFKIVRKVLS-YPQVNIVKKTEVQT HGLDR PSPK-PKP- | 1122 |
| WP_037593752 | 1043 | -----------DIQ T-NED-GE-IAWNKEKHIKILRKVLS-YPQVNIVKKTEEQT GGFSK ESIL-PKG- | 1094 |
| WP_049516684 | 1043 | -----------DIQ T-NED-GE-IAWNKEKHIKILRKVLS-YPQVNIVKKTEEQT GGFSK ESIL-PKG- | 1094 |
| GAD46167 | 1042 | -----------DIQ T-NED-GE-IAWNKEKHIKILRKVLS-YPQVNIVKKTEEQT GGFSK ESIL-PKG- | 1093 |
| WP_018363470 | 1063 | YSN-GKVIVRPVVE Y-SKDtGE-IAWNKRTDFEKVRKVLS-YPQVNIVKKVETQT GGFSK ESIL-PKG- | 1125 |
| WP_003043819 | 1061 | LAN-GEIRKRPLIE TNGET-GE-VVWNKEKDFATVRKVLA-MPQVNIVKKTEVQT GGFSK ESIL-SKR- | 1123 |
| WP_006269658 | 1042 | -----------DIQ T-NED-GE-IAWNKEKHIKILRKVLS-YPQVNIVKKTEEQT GGFSK ESIL-PKG- | 1093 |
| WP_048800889 | 1052 | FAD-GTVVERPDIE T-SED-GE-IAWNKQTDFKIVRKVLS-YPQVNIVKKVEKQT GRFSK ESIL-PKG- | 1113 |
| WP_012767106 | 1051 | LAN-GEIRKRPLIE TNEET-GE-IVWDKGRDFATVRKVLS-MPQVNIVKKTEVQT GALTN ESIY-ARG- | 1113 |
| WP_014612333 | 1051 | LAN-GEIRKRPLIE TNEET-GE-IVWDKGRDFATVRKVLS-MPQVNIVKKTEVQT GALTN ESIY-ARG- | 1113 |
| WP_015017095 | 1051 | LAN-GEIRKRPLIE TNEET-GE-IVWNKGRDFATVRKVLS-MPQVNIVKKTEVQT GALTN ESIY-ARG- | 1113 |
| WP_015057649 | 1051 | LAN-GEIRKRPLIE TNEET-GE-IVWDKGRDFATVRKVLS-MPQVNIVKKTEVQT GALTN ESIY-ARG- | 1113 |
| WP_048327215 | 1051 | LAN-GEIRKRPLIE TNEET-GE-IVWDKGRDFATVRKVLS-MPQVNIVKKTEVQT GALTN ESIY-ARG- | 1113 |
| WP_049519324 | 1051 | LAN-GEIRKRPLIE TNEET-GE-IVWDKGRDFATVRKVLS-MPQVNIVKKTEVQT GALTN ESIY-ARG- | 1113 |
| WP_012515931 | 1044 | L------------H VNSD--GE-EIWNANKHLPIIKNVLS-IPQVNIVKKTEVQT GGFYK ESIL-SKG- | 1094 |
| WP_021320964 | 1044 | L------------H VNSD--GE-EIWNANKHLPIIKNVLS-IPQVNIVKKTEVQT GGFYK ESIL-SKG- | 1094 |
| WP_037581760 | 1044 | L------------H VNSD--GE-EIWNANKHLPIIKNVLS-IPQVNIVKKTEVQT GGFYK ESIL-SKG- | 1094 |
| WP_004232481 | 1062 | YAD-GRVFERPDIE T-NAD-GE-VVWNKQRDFNIVRKVLS-YPQVNIVKKVEVQT GGFSK ESIL-PKG- | 1123 |
| WP_009854540 | 1057 | YAD-GTVFERPIIE T-NAD-GE-IAWNKQIDFEKVRKVLS-YPQVNIVKKVETQT GGFSK ESIL-PKG- | 1118 |
| WP_012962174 | 1057 | YSN-GKVVVRPVIE C-SKDtGE-IAWNKQTDFEKVRRVLS-YPQVNIVKKVETQT GGFSK ESIL-PKG- | 1119 |
| WP_039695303 | 1059 | YAD-GTVFERPIIE T-NAD-GE-IAWNKQIDFEKVRKVLS-YPQVNIVKKVETQT GGFSK ESIL-PKG- | 1120 |
| WP_014334983 | 1062 | YAD-GRVFERPDIE T-NAD-GE-VVWNKQKDFDIVRKVLS-YPQVNIVKKVEAQT GGFSK ESIL-SKG- | 1123 |
| WP_003099269 | 1052 | LAD-DTIFTRPQIE VNTET-GE-IVWDKVKDMQTIRKVMS-YPQVNIVMKTEVQT GGFSK ESIW-PKG- | 1114 |
| AHY15608 | 1052 | LAD-DTIFTRPQIE VNTET-GE-IVWDKVKDMQTIRKVMS-YPQVNIVMKTEVQT GGFSK ESIW-PKG- | 1114 |
| AHY17476 | 1052 | LAD-DTIFTRPQIE VNTET-GE-IVWDKVKDMQTIRKVMS-YPQVNIVMKTEVQT GGFSK ESIW-PKG- | 1114 |
| ESR09100 | | -------------- ----------------------------------------- ----- --------- | |
| AGM98575 | 1052 | LAD-DTIFTRPQIE VNTET-GE-IVWDKVKDMQTIRKVMS-YPQVNIVMKTEVQT GGFSK ESIW-PKG- | 1114 |
| ALF27331 | 1042 | -----------DVR T-DKN-GE-IIWKKDEHISNIKKVLS-YPQVNIVKKVEEQT GGFSK ESIL-PKG- | 1093 |
| WP_018372492 | 1056 | --K----------K --DQEtGE-IVWDKKEIENIVKKVIY-SSPVNIVKKREEQS GALFK QSNM-AVGy | 1108 |
| WP_045618028 | 1057 | YAD-GTIVKRENIE Y-SKDtGE-IAWNKEKDFATIKKVLS-LPQVNIVKKTEEQT GGLFD NNIV-SKKk | 1124 |
| WP_045635197 | 1056 | YAD-GTIVKRENIE Y-SKDtGE-IAWNKEKDFAIIKKVLS-LPQVNIVKKREVQT GGFSK ESIL-PKG- | 1118 |
| WP_002263549 | 1042 | -----------DVR T-DKN-GE-IIWKKDEHISNIKKVLS-YPQVNIVKKVEEQT GGFSK ESIL-PKG- | 1093 |
| WP_002263887 | 1042 | -----------DVR T-DKN-GE-IIWKKDEHISNIKKVLS-YPQVNIVKKVEEQT GGFSK ESIL-PKG- | 1093 |
| WP_002264920 | 1042 | -----------DVR T-DKN-GE-IIWKKDEYISNIKKVLS-YPQVNIVKKVEEQT GGFSK ESIL-PKG- | 1093 |
| WP_002269043 | 1042 | -----------DVR T-DKN-GE-IIWKKDEHISNIKKVLS-YPQVNIVKKVEEQT GGFSK ESIL-PKG- | 1093 |
| WP_002269448 | 1042 | -----------DVR T-DKN-GE-IIWKKDEHISNIKKVLS-YPQVNIVKKVEEQT GGFSK ESIL-PKG- | 1093 |
| WP_002271977 | 1042 | -----------DVR T-DKN-GE-IIWKKDEHISNIKKVLS-YPQVNIVKKVEEQT GGFSK ESIL-PKG- | 1093 |
| WP_002272766 | 1042 | -----------DVR T-DKN-GE-IIWKKDEHISNIKKVLS-YPQVNIVKKVEEQT GGFSK ESIL-PKG- | 1093 |
| WP_002273241 | 1042 | -----------DVR T-DKN-GE-IIWKKDEHISNIKKVLS-YPQVNIVKKVEEQT GGFSK ESIL-PKG- | 1093 |
| WP_002275430 | 1042 | -----------DVR T-DKN-GE-IIWKKDEHISNIKKVLS-YPQVNIVKKVEEQT GGFSK ESIL-PKG- | 1093 |
| WP_002276448 | 1042 | -----------DVR T-DRN-GE-IIWKKDEHISNIKKVLS-YPQVNIVKKVEEQT GGFSK ESIL-PKG- | 1093 |
| WP_002277050 | 1047 | LAD-DQIVERPMIE VNDET-GE-IAWDKTKHITTVKKVLS-YPQVNIVKKVEEQT GGLED -----PKS- | 1111 |
| WP_002277364 | 1042 | -----------DVR T-DKN-GE-IIWKKDEHISNIKKVLS-YPQVNIVKKVEEQT GGFSK ESIL-PKG- | 1093 |
| WP_002279025 | 1042 | -----------DVR T-DKN-GE-IIWKKDEHISNIKKVLS-YPQVNIVKKVEEQT GGFSK ESIL-PKG- | 1093 |
| WP_002279859 | 1042 | -----------DVR T-DKN-GE-IIWKKDEYISNIKKVLS-YPQVNIVKKVEEQT GGFSK ESIL-PKG- | 1093 |
| WP_002280230 | 1042 | -----------DVR T-DKN-GE-IIWKKDEHISNIKKVLS-YPQVNIVKKVEEQT GGFSK ESIL-PKG- | 1093 |
| WP_002281696 | 1042 | -----------DVR T-DKN-GE-IIWKKDEHISNIKKVLS-YPQVNIVKKVEEQT GGFSK ESIL-PKG- | 1093 |
| WP_002282247 | 1047 | LAD-DQIVERPMIE VNDET-GE-IAWDKTKHITTVKKVLS-YPQVNIVKKVEEQT GGLFD -----PKS- | 1111 |
| WP_002282906 | 1042 | -----------DVR I-DKN-GE-IIWKKDEHISNIKKVLS-YPQVNIVKKVEEQT GGFSK ESIL-PKG- | 1093 |
| WP_002283846 | 1042 | -----------DVR T-DKN-GE-IIWKKDEHISNIKKVLS-YPQVNIVKKVEEQT GGFSK ESIL-PKG- | 1093 |
| WP_002287255 | 1042 | -----------DVR T-DKN-GE-IIWKKDEHISNIKKVLS-YPQVNIVKKVEEQT GGFSK ESIL-PKG- | 1093 |
| WP_002288990 | 1042 | -----------DVR T-DKN-GE-IIWKKDEHISNIKKVLS-YPQVNIVKKVEEQT GGFSK ESIL-PKG- | 1093 |
| WP_002289641 | 1042 | -----------DVR T-DKN-GE-IIWKKDEHISNIKKVLS-YPQVNIVKKVEEQT GGFSK ESIL-PKG- | 1093 |
| WP_002290427 | 1042 | -----------DVR T-DKN-GE-IIWKKDEYISNIKKVLS-YPQVNIVKKVEEQT GGFFK ESIL-PKG- | 1093 |
| WP_002295753 | 1042 | -----------DVR T-DKN-GE-IIWKKDEYISNIKKVLS-YPQVNIVKKVEEQT GGFSK ESIL-PKG- | 1093 |
| WP_002296423 | 1042 | -----------DVR T-DKN-GE-IIWKKDEHISNIKKVLS-YPQVNIVKKVEEQT GGFSK ESIL-PKG- | 1093 |
| WP_002304487 | 1056 | -----------DVR T-DKN-GE-IIWKKDEHISNIKKVLS-YPQVNIVKKVEEQT GGFSK ESIL-PKG- | 1107 |
| WP_002305844 | 1042 | -----------DVR T-DKN-GE-IIWKKDEHISNIKKVLS-YPQVNIVKKVEEQT GGFSK ESIL-PKG- | 1093 |
| WP_002307203 | 1042 | -----------DVR T-DKN-GE-IIWKKDEYISNIKKVLS-YPQVNIVKKVEEQT GGFSK ESIL-PKG- | 1093 |
| WP_002310390 | 1042 | -----------DVR T-DKN-GE-IIWKKDEYISNIKKVLS-YPQVNIVKKVEEQT GGFFK ESIL-PKG- | 1093 |
| WP_002352408 | 1042 | -----------DVR T-DKN-GE-IIWKKDEYISNIKKVLS-YPQVNIVKKVEEQT GGFSK ESIL-PKG- | 1093 |
| WP_012997688 | 1042 | -----------DVR T-DKN-GE-IIWKKDEHISNIKKVLS-YPQVNIVKKVEEQT GGFSK ESIL-PKG- | 1093 |
| WP_014677909 | 1042 | -----------DVR T-DKN-GE-IIWKKDEHISNIKKVLS-YPQVNIVKKVEEQT GGFSK ESIL-PKG- | 1093 |
| WP_019312892 | 1042 | -----------DVR T-DKN-GE-IIWKKDEHISNIKKVLS-YPQVNIVKKVEEQT GGFSK ESIL-PKG- | 1093 |
| WP_019313659 | 1042 | -----------DVR T-DKN-GE-IIWKKDEHISNIKKVLS-YPQVNIVKKVEEQT GGFSK ESIL-PKG- | 1093 |
| WP_019314093 | 1042 | -----------DVR T-DKN-GE-IIWKKDEYISNIKKVLS-YPQVNIVKKVEEQT GGFSK ESIL-PKG- | 1093 |
| WP_019315370 | 1042 | -----------DVR T-DKN-GE-IIWKKDEHISNIKKVLS-YPQVNIVKKVEEQT GGFSK ESIL-PKG- | 1093 |
| WP_019803776 | 1042 | -----------DVR T-DKN-GE-IIWKKDEHISNIKKVLS-YPQVNIVKKVEEQT GGFSK ESIL-PKG- | 1093 |
| WP_019805234 | 1042 | -----------DVR T-DKN-GE-IIWKKDEYISNIKKVLS-YPQVNIVKKVEEQT GGFFK ESIL-PKG- | 1093 |
| WP_024783594 | 1042 | -----------DVR T-DKN-GE-IIWKKDEHISNIKKVLS-YPQVNIVKKVEEQT GGFSK ESIL-PKG- | 1093 |
| WP_024784288 | 1047 | LAD-DQIVERPMIE VNDET-GE-IAWDKTKHITTVKKVLS-YPQVNIVKKVEEQT GGLED -----PKS- | 1111 |
| WP_024784666 | 1042 | -----------DVR T-DKN-GE-IIWKKDEHISNIKKVLS-YPQVNIVKKVEEQT GGFSK ESIL-PKG- | 1093 |
| WP_024784894 | 1042 | -----------DVR T-DKN-GE-IIWKKDEHISNIKKVLS-YPQVNIVKKVEEQT GGFSK ESIL-PKG- | 1093 |
| WP_024786433 | 1047 | LAD-DQIVERPMIE VNDET-GE-IAWDKTKHITTVKKVLS-YPQVNIVKKVEEQT GGLFD -----PKS- | 1111 |
| WP_049473442 | 1042 | -----------DVR T-DKN-GE-IIWKKDEHISNIKKVLS-YPQVNIVKKVEEQT GGFSK ESIL-PKG- | 1093 |
| WP_049474547 | 1042 | -----------DVR T-DKN-GE-IIWKKDEHISNIKKVLS-YPQVNIVKKVEEQT GGFSK ESIL-PKG- | 1093 |
| EMC03581 | 1035 | -----------DVR T-DKN-GE-IIWKKDEHISNIKKVLS-YPQVNIVKKVEEQT GGFSK ESIL-PKG- | 1086 |
| WP_000428612 | 1059 | YAD-GTIVKRENIE Y-SKDtGE-IAWNKEKDFATIKKVLS-LPQVNIVKKREVQT GGFSK ESIL-PKG- | 1121 |
| WP_000428613 | 1057 | YAD-GTIVKRENIE Y-SKDtGE-IAWNKEKDFATIKKVLS-YPQVNIVKKREVQT GGFSK ESIL-PKG- | 1119 |
| WP_049523028 | 1052 | YAD-GTIIQRGNVE Y-SKDtGE-IAWNKKRDFAIVRKVLS-YPQVNIVKKTEEQT GGFSK ESIL-PKG- | 1114 |
| WP_003107102 | 1021 | LAD-GTVITRPQIE TNTET-GE-IVWDKVKDIKTIRKVLS-IPQINVVKKTEVQT GGFSK ESIL-SKR- | 1083 |
| WP_054279288 | 1053 | LAN-GNIIKRSPIE VNEET-GE-IVWDKTKDFGTVRKVLS-APQVNIVKKTEIQT GGFSN ETIL-SKG- | 1115 |
| WP_049531101 | 1057 | YAD-GTIVKRENIE Y-SKDtGE-IAWNKEIDFATIRKILS-LSQVNIVKKTEEQT GGLFD NNIV-SKKk | 1124 |
| WP_049538452 | 1057 | YAD-GTIVKRENIE Y-SKDtGE-IAWNKEKDFATIKKILS-LPQVNIVKKTEEQT GGLFD NNIV-SKKk | 1124 |
| WP_049549711 | 1059 | YAD-GTIVKRENIE Y-SKDtGE-IAWNKEKDFATIKKVLS-YPQVNIVKKTEEQT GGLFD NNIV-SKEk | 1126 |
| WP_007896501 | 1058 | LAD-GTLMKRPVIE TNTET-GE-VVWDKVKDFKTIRKVLS-YPQVNIVKKTEIQS GAFSK ESVL-SKG- | 1120 |
| EFR44625 | 1010 | LAD-GTLMKRPVIE TNTET-GE-VVWDKVKDFKTIRKVLS-YPQVNIVKKTEIQS GAFSK ESVL-SKG- | 1072 |
| WP_002897477 | 1056 | YAD-GTIRKRENIE Y-SKDtGE-IAWDKEKDFATIKKVLS-YPQVNIVKKREVQT GGFSK ESIL-PKG- | 1118 |
| WP_002906454 | 1056 | YAD-GTIKKRENIE Y-SNDtGE-IAWNKEKDFATIKKVLS-LPQVNIVKKTEEQT GGLFD NNIV-SKKk | 1123 |
| WP_009729476 | 1057 | YAD-GTIVKRENIE Y-SKDtGE-IAWNKEKDFATIKKVLS-LPQVNIVKKREVQT GGFSK ESIL-PKG- | .119 |
| CQR24647 | 1047 | LAD-GRVVEKPVIE ANEET-GE-IAWDKTKHFANVKKVLS-YPQVSIVKKVEEQT GGFSK ESIL-PKG- | 1109 |
| WP_000066813 | 1061 | YAD-GTIVKRENIE Y-SKDtGE-IAWNKEKDFATVKKVLS-LPQVNIVKKTEVQT GGFSK ESIL-PKG- | 1123 |
| WP_009754323 | 1057 | YAD-GTIVKRENIE Y-SKDtGE-IAWNKEKDFVTIKKVLS-YPQVNIVKKREVQT GGFSK ESIL-PKG- | 1119 |
| WP_044674937 | 1049 | YSKtGEVRIRPVIE VNKET-GE-IVWDKKSDFRTVRKVLS-YPQVNVVKKVEMQT GGFSK ESIL-QHG- | 1112 |
| WP_044676715 | 1051 | YSKtGEVRIRPVIE VNKET-GE-IVWDKKSDFRTVRKVLS-YPQVNVVKKVEMQT GGFSK ESIL-QHG- | 1114 |
| WP_044680361 | 1051 | YSKtGEVRIRPVIE VNKET-GE-IVWDKKSDFRTVRKVLS-YPQVNVVKKVEMQT GGFSK ESIL-QHG- | 1114 |
| WP_044681799 | 1049 | YSKtGEVRIRPVIE VNKET-GE-IVWDKKSDFKTVRKVLS-YPQVNVVKKVEMQT GGFSK ESIL-QHG- | 1112 |
| WP_049533112 | 1051 | FAD-GTVVERPDIE T-SED-GE-IAWNKQTDFKIVRKVLS-YPQVNIVKKTEVQT HGLDR PSPK-PKP- | 1122 |
| WP_029090905 | 1008 | -KQ----------Q --NSTtGE-VKWNPEVDIAKLKRILN-FKQCNIVRKVEEQS GALFK ETIY-PVEe | 1061 |
| WP_006506696 | 1039 | --D----------- ------GK-LIWNP-DLINEIKKCFY-YKDCYCTTKLDOKS GQLEN -TVL-SNDa | 1084 |
| AIT42264 | 1052 | LAN-GEIRKRPLIE TNGET-GE-IVWDKGRDFATVRKVLS-MPQVNIVKKTEVQT GGFSK ESIL-PKR- | 1114 |
| WP_034440723 | 1042 | ------------LA --NPD-GE-IAWEKDKDLNTIRKVLS-SKQINIIKKAEEGK GRLFK ETIN-SRPS | 1092 |
| AKQ21048 | 1052 | LAN-GEIRKRPLIE TNGET-GE-IVWDKGRDFATVRKVLS-MPQVNIVKKTEVQT GGFSK ESIL-PKR- | 1114 |
| WP_004636532 | 1043 | -------------- VNEET-GE-ILWDTERHLSTIKRVLS-WKOMNIVKKVEKQK GQLWK ETIY-PKG- | 1092 |
| WP_002364836 | 1048 | --E----------P RFTKD-GE-ILWSN-SYLKTIKKELN-YHOMNIVKKVEVQK GGFSK ESIK-PKG- | 1098 |
| WP_016631044 | 999 | --E----------P RFTKD-GE-ILWSN-SYLKTIKKELN-YHOMNIVKKVEVOK GGFSK ESIK-PKG- | 1049 |
| EMS75795 | 783 | --E----------Y SYDEN-GE-IFWDKARHIPQIKKVIS-SHQVNIVKKVEVQT GGFYK ETVN-PKG- | 834 |
| WP_002373311 | 1048 | --E----------P RFTKD-SE-ILWSN-SYLKTIKKELN-YHOMNIVKKVEVQK GGFSK ESIK-PKG- | 1098 |
| WP_002378009 | 1048 | --E----------P RFTKD-GE-ILWSN-SYLKTIKKELN-YHOMNIVKKVEVQK GGFSK ESIK-PKG- | 1098 |
| WP_002407324 | 1048 | --E----------P RFTKD-GE-ILWSN-SYLKTIKKELN-YHOMNIVKKVEVQK GGFSK ESIK-PKG- | 1098 |
| WP_002413717 | 1048 | --E----------P RFTKD-GE-ILWSN-SYLKTIKKELN-YHQMNIVKKVEVQK GGFSK ESIK-PKG- | 1098 |
| WP_010775580 | 1050 | --E----------P RFTKD-GE-ILWSN-SYLKTIKKELN-YHOMNIVKKVEVQK GGFSK ESIK-PKG- | 1100 |
| WP_010818269 | 1048 | --E----------P RFTKD-GE-ILWSN-SYLKTIKKELN-YHOMNIVKKVEVQK GGFSK ESIK-PKG- | 1098 |
| WP_010824395 | 1048 | --E----------P RFTKD-GE-ILWSN-SYLKTIKKELN-YHQMNIVKKVEVQK GGFSK ESIK-PKG- | 1098 |
| WP_016622645 | 1048 | --E----------P RFTKD-GE-ILWSN-SYLKTIKKELN-YHQMNIVKKVEVQK GGFSK ESIK-PKG- | 1098 |
| WP_033624816 | 1048 | --E----------P RFTKD-GE-ILWSN-SYLKTIKKELN-YHOMNIVKKVEVOK GGFSK ESIK-PKG- | 1098 |
| WP_033625576 | 1048 | --E----------P RFTKD-GE-ILWSN-SYLKTIKKELN-YHOMNIVKKVEVOK GGFSK ESIK-PKG- | 1098 |
| WP_033789179 | 1048 | --E----------P RFTKD-GE-ILWSN-SYLKTIKKELN-YHQMNIVKKVEVQK GGFSK ESIK-PKG- | 1098 |
| WP_002310644 | 1049 | --T----------P VCDEN-GE-IFWDKSKSIAQVKKVIN-HHHMNIVKKTEIQK GGFSK ETVE-PKK- | 1100 |
| WP_002312694 | 1050 | --T----------P VCDEN-GE-IFWDKSKSIAQVKKVIN-HHHMNIVKKTEIQK GGFSK ETVE-PKK- | 1101 |
| WP_002314015 | 1050 | --T----------P VCDEN-GE-IFWDKSKSIAQVKKVIN-HHHMNIVKKTEIQK GGFSK ETVE-PKK- | 1101 |
| WP_002320716 | 1050 | --T----------P VCDEN-GE-IFWDKSKSIAQVKKVIN-HHHMNIVKKTEIQK GGFSK ETVE-PKK- | 1101 |
| WP_002330729 | 1049 | --T----------P VCDEN-GE-IFWDKSKSIAQVKKVIN-HHHMNIVKKTEIQK GGFSE ETVE-PKK- | 1100 |
| WP_002335161 | 1050 | --T----------P VCDEN-GE-IFWDKSKSIAQVKKVIN-HHHMNIVKKTEIQK GGFSK ETVE-PKK- | 1101 |
| WP_002345439 | 1050 | --T----------P VCDEN-GE-IFWDKSKSIAQVKKVIN-HHHMNIVKKTEIQK GGFSK ETVE-PKK- | 1101 |
| WP_034867970 | 1040 | --E----------P FCDEN-GE-IYWEKSHHLPRIKKVLS-SHQVNVVKKVEQQK GGFYK ETVN-SKE- | 1091 |
| WP_047937432 | 1050 | --T----------P VCDEN-GE-IFWDKSKSIAQVKKVIN-HHHMNIVKKTEIQK GGFSK ETVE-PKK- | 1101 |
| WP_010720994 | 1040 | --E----------P FCDEN-GE-IYWEKSHHLPRIKKVLS-SHQVNVVKKVEQQK GGFYK ETVN-SKE- | 1091 |
| WP_010737004 | 1040 | --E----------P FCDEN-GE-IYWEKSHHLPRIKKVLS-SHQVNVVKKVEQQK GGFYK ETVN-SKE- | 1091 |
| WP_034700478 | 1040 | --E----------P FCDEN-GE-IYWEKSHHLPRIKKVLS-SHQVNVVKKVEQQK GGFYK ETVN-SKE- | 1091 |
| WP_007209003 | 1038 | --D----------- IINDD-GE-ILWNKQETIAQVIKTLG-MHQVNVVKKVEIQK GGFSK ESIQ-PKG- | 1089 |
| WP_023519017 | 1034 | --E----------I ICDEQ-GE-VIWNKKRDLSTIKKTIG-AHQVNIVKKVEKQK GGFYK ETIN-SKA- | 1085 |
| WP_010770040 | 1046 | --A----------V IIDEN-GE-ILWDK-KNIATVKKVMS-YPQMNIVKKPEIQT GSFSK ETIK-PKG- | 1096 |
| WP_048604708 | 1043 | --K----------V IIDEN-GE-ILWNQ-KKIVTVKKVMN-YRQMNIVKKVEIQK GGFSK ESIL-PKG- | 1093 |
| WP_010750235 | 1043 | --E----------Q FCDEN-GE-IFWDKRKHIQQIKKVIS-SHQVNIVKKVEVQT GSFYK ETVN-TKE- | 1094 |
| AII16583 | 1091 | LAN-GEIRKRPLIE TNGET-GE-IVWDKGRDFATVRKVLS-MPQVNIVKKTEVQT GGFSK ESIL-PKR- | 1153 |
| WP_029073316 | 1053 | --D----------- ----T-GE-VVWDP-EWISRIKKCFY-YKDCFVTKKLEENN GSFFN -TVR-PNDe | 1099 |
| WP_031589969 | 1053 | --D----------- ----T-GE-IVWDP-NYIDRIKKCFY-YKDCFVTKKLEENN GTFFN -TVL-PNDt | 1099 |
| KDA45870 | 1035 | YPF----------- -----------WDKARDLPTIKRYLY-RAQVNKVRKAERQT GGFSD EMLV-PKS- | 1078 |
| WP_039099354 | 1044 | -------------E LVDEN-TEaVIWNKESGLAYLNKIYQ-FKKILVTREVHENS GALEN QTLYaAKDd | 1097 |
| AKP02966 | 1063 | --N-------GTTQ --DRNtGE-IIWNVG-FRDKILKIFN-YHQCNVTRKTEIKT GQFYD QTIYSPKNp | 1118 |
| WP_010991369 | 1045 | --D----------R IIDEN-GE-ILWDK-KYLDTVKKVMS-YRQMNIVKKTEIQK GEFSK ATIK-PKG- | 1095 |
| WP_033838504 | 1045 | --D----------R IIDEN-GE-ILWDK-KYLDTVKKVMS-YRQMNIVKKTEIQK GEFSK ATIK-PKG- | 1095 |
| EHN60060 | 1048 | --D----------R IIDEN-GE-ILWDK-KYLDTVKKVMS-YRQMNIVKKTEIQK GEFSK ATIK-PKG- | 1098 |
| EFR89594 | 814 | --D----------R IIDEN-GE-ILWDK-KYLDTVKKVMS-YRQMNIVKKTEIQK GEFSK ATIK-PKG- | 864 |
| WP_038409211 | 1045 | --N----------Q IIDKN-GE-ILWDN-RYLDTIKKVLS-YROMNIVKKTEIQK GEFSN ATVN-PKG- | 1095 |
| EFR95520 | 664 | --N----------Q IIDKN-GE-ILWDN-RYLDTIKKVLS-YROMNIVKKTEIQK GEFSN ATVN-PKG- | 714 |
| WP_003723650 | 1045 | --E----------R IIDEN-GE-ILWDK-KYLETIKKVLD-YROMNIVKKTEIQK GEFSK ATIK-PKG- | 1095 |
| WP_003727705 | 1045 | --E----------R IIDEN-GE-ILWDK-KYLETIKKVLD-YRQINIVKKTEIQK GEFSK ATIK-PKG- | 1095 |
| WP_003730785 | 1045 | --E----------R IIDEN-GE-ILWDK-KYLETIKKVLD-YRQINIVKKTEIQK GEFSK ATIK-PKG- | 1095 |
| WP_003733029 | 1045 | --D----------R IIDEN-GE-ILWDK-RYLETVKKVLG-YRQMNIVKKTEIQK GEFSN VTPN-PKG- | 1095 |
| WP_003739838 | 1045 | --E----------R IIDEN-GE-ILWDK-KYLETIKKVLD-YRQMNIVKKTEIQK GEFSK ATIK-PKG- | 1095 |
| WP_014601172 | 1045 | --E----------R IIDEN-GE-ILWDK-KYLETIKKVLD-YROMNIVKKTEIQK GEFSK ATIK-PKG- | 1095 |
| WP_023548323 | 1045 | --E----------R IIDEN-GE-ILWDK-KYLETIKKVLN-YROMNIVKKTEIQK GEFSN QNPK-PRG- | 1095 |
| WP_031665337 | 1045 | --E----------R IIDEN-GE-ILWDK-KYLETIKKVLD-YROMNIVKKTEIQK GEFSK ATIK-PKG- | 1095 |
| WP_031669209 | 1045 | --E----------R IIDEN-GE-ILWDK-RYLETVKKVLG-YROMNIVKKTEIQK GEFSN VTPN-PKG- | 1095 |
| WP_033920898 | 1045 | --E----------R IIDEN-GE-ILWDK-KYLETIKKVLN-YRQMNIVKKTEIQK GEFSN QNPK-PRG- | 1095 |
| AKI42028 | 1048 | --E----------R IIDEN-GE-ILWDK-KYLETIKKVLD-YRQMNIVKKTEIQK GEFSK ATIK-PKG- | 1098 |
| AKI50529 | 1048 | --E----------R IIDEN-GE-ILWDK-KYLETIKKVLN-YRQMNIVKKTEIQK GEFSN QNPK-PRG- | 1098 |
| EFR83390 | 493 | --E----------R IIDEN-GE-ILWDK-KYLETIKKVLD-YRQMNIVKKTEIQK GEFSK ATIK-PKG- | 543 |
| WP_046323366 | 1045 | --D----------R IIDEN-GE-ILWDK-KYLDTIKKVLN-YRQMNIVKKTEIQK GEFSN ATAN-PKG- | 1095 |
| AKE81011 | 1068 | LAN-GEIRKRPLIE TNGET-GE-IVWDKGRDFATVRKVLS-MPQVNIVKKTEVQT GGFSK ESIL-PKR- | 1130 |
| CUO82355 | 1043 | --D----------- ------GK-LIWNP-DLINEIKKCFY-YKDCYCTTKLDQKS GQMFN -TVL-PNDa | 1088 |
| WP_033162887 | 1043 | --D----------- ----T-GE-VMWDP-AKIGKIKSCFY-YKDVYVTKKLEONS GTLEN -TVL-PNDa | 1089 |
| AGZ01981 | 1085 | LAN-GEIRKRPLIE TNGET-GE-IVWDKGRDFATVRKVLS-MPQVNIVKKTEVQT GGFSK ESIL-PKR- | 1147 |
| AKA60242 | 1052 | LAN-GEIRKRPLIE TNGET-GE-IVWDKGRDFATVRKVLS-MPQVNIVKKTEVQT GGFSK ESIL-PKR- | 1114 |
| AKS40380 | 1052 | LAN-GEIRKRPLIE TNGET-GE-IVWDKGRDFATVRKVLS-MPQVNIVKKTEVQT GGFSK ESIL-PKR- | 1114 |
| 4UN5_B | 1056 | LAN-GEIRKRPLIE TNGET-GE-IVWDKGRDFATVRKVLS-MPQVNIVKKTEVQT GGFSK ESIL-PKR- | 1118 |
| WP_010922251 | 1115 | --NSD KLIA----RKKDW-DPKKYGGFDSPTVAYSV-LVVAK--VE--KGKSKKLKSVKELLGITIME RSSFEK | 1176 |
| WP_039695303 | 1121 | --DSD KLIPRKTKKV-YW-DTKKYGGFDSPTVAYSV-FVVAD--VE--KGKAKKLKTVKELVGISIME RSFFEE | 1185 |
| WP_045635197 | 1119 | --NSD KLIPRKT-KDILL-DTTKYGGFDSPVIAYSI-LLIAD--IE--KGKAKKLKTVKTLVGITIME KAAFEE | 1183 |
| 5AXW_A | 853 | --EKN -LYKYYEeTGNYL---TKYSKKDNGPVIKKI------------KYYGNKLNAHLDITDDYPNS -VKLSL | 912 |
| WP_009880683 | 799 | --NSD KLIA----RKKDW-DPKKYGGFDSPTVAYSV-LVVAK--VE--KGKSKKLKSVKELVGITIME RSSFEK | 860 |
| WP_010922251 | 1115 | --NSD KLIA----RKKDW-DPKKYGGFDSPTVAYSV-LVVAK--VE--KGKSKKLKSVKELLGITIME RSSFEK | 1176 |
| WP_011054416 | 1115 | --NSD KLIA----RKKDW-DPKKYGGFDSPTVAYSV-LVVAK--VE--KGKSKKLKSVKELLGITIME RSSFEK | 1176 |
| WP_011284745 | 1115 | --NSD KLIA----RKKDW-DPKKYGGFDSPTVAYSV-LVVAK--VE--KGKSKKLKSVKELLGITIME RSSFEK | 1176 |
| WP_011285506 | 1115 | --NSD KLIA----RKKDW-DPKKYGGFDSPTVAYSV-LVVAK--VE--KGKSKKLKSVKELLGITIME RSSFEK | 1176 |
| WP_011527619 | 1115 | --NSD KLIA----RKKDW-DPKKYGGFDSPTVAYSV-LVVAK--VE--KGKSKKLKSVKELLGITIME RSSFEK | 1176 |
| WP_012560673 | 1115 | --NSD KLIA----RKKDW-DPKKYGGFDSPTVAYSV-LVVAK--VE--KGKSKKLKSVKELVGITIME RSSFEK | 1176 |
| WP_014407541 | 1114 | --NSD KLIA----RKKDW-DPKKYGGFDSPTVAYSV-LVVAK--VE--KGKSKKLKSVKELLGITIME RSSFEK | 1175 |
| WP_020905136 | 1115 | --NSD KLIA----RKKDW-DPKKYGGFDSPTVAYSV-LVVAK--VE--KGKSKKLKSVKELLGLTIME RSSFEK | 1176 |
| WP_023080005 | 1114 | --NSD KLIA----RKKDW-DPKKYGGFDSPTVAYSV-LVVAK--VE--KGKSKKLKSVKELLGITIME RSSFEK | 1175 |
| WP_023610282 | 1114 | --NSD KLIA----RKKDW-DPKKYGGFDSPTVAYSV-LVVAK--VE--KGKSKKLKSVKELLGITIME RSSFEK | 1175 |
| WP_030125963 | 1115 | --NSD KLIA----RKKDW-DPKKYGGFDSPTVAYSV-LVVAK--VE--KGKSKKLKSVKELLGITIME RSSFEK | 1176 |
| WP_030126706 | 1115 | --NSD KLIA----RKKDW-DPKKYGGFDSPTVAYSV-LVVAK--VE--KGKSKKLKSVKELLGITIME RSSFEK | 1176 |
| WP_031488318 | 1115 | --NSD KLIA----RKKDW-DPKKYGGFDSPTVAYSV-LVVAK--VE--KGKSKKLKSVKELLGITIME RSSFEK | 1176 |
| WP_032460140 | 1115 | --NSD KLIA----RKKDW-DPKKYGGFDSPTVAYSV-LVVAK--VE--KGKSKKLKSVKELVGITIME RSSFEK | 1176 |
| WP_032461047 | 1115 | --NSD KLIA----RKKDW-DPKKYGGFDSPTVAYSV-LVVAK--VE--KGKSKKLKSVKELVGITIME RSSFEK | 1176 |
| WP_032462016 | 1115 | --NSD KLIA----RKKDW-DPKKYGGFDSPTVAYSV-LVVAK--VE--KGKSKKLKSVKELLGITIME RSSFEK | 1176 |
| WP_032462936 | 1115 | --NSD KLIA----RKKDW-DPKKYGGFDSPTVAYSV-LVVAK--VE--KGKSKKLKSVKELLGITIME RSSFEK | 1176 |
| WP_032464890 | 1115 | --NSD KLIA----RKKDW-DPKKYGGFDSPTVAYSV-LVVAK--VE--KGKSKKLKSVKELLGITIME RSSFEK | 1176 |
| WP_033888930 | 940 | --NSD KLIA----RKKDW-DPKKYGGFDSPTVAYSV-LVVAK--VE--KGKSKKLKSVKELLGITIME RSSFEK | 1001 |
| WP_038431314 | 1115 | --NSD KLIA----RKKDW-DPKKYGGFDSPTVAYSV-LVVAK--VE--KGKSKKLKSVKELLGITIME RSSFEK | 1176 |
| WP_038432938 | 1114 | --NSD KLIA----RKKDW-DPKKYGGFDSPTVAYSV-LVVAK--VE--KGKSKKLKSVKELLGITIME RSSFEK | 1175 |
| WP_038434062 | 1115 | --NSD KLIA----RKKDW-DPKKYGGFDSPTVAYSV-LVVAK--VE--KGKSKKLKSVKELLGITIME RSSFEK | 1176 |
| BAQ51233 | 1026 | --NSD KLIA----RKKDW-DPKKYGGFDSPTVAYSV-LVVAK--VE--KGKSKKLKSVKELLGITIME RSSFEK | 1087 |
| KGE60162 | 290 | --NSD KLIA----RKKDW-DPKKYGGFDSPTVAYSV-LVVAK--VE--KGKSKKLKSVKELLGITIME RSSFEK | 351 |
| KGE60856 | 53 | --NSD KLIA----RKKDW-DPKKYGGFDSPTVAYSV-LVVAK--VE--KGKSKKLKSVKELLGITIME RSSFEK | 114 |
| WP_002989955 | 1115 | --NSD KLIA----RKKDW-DPKKYGGFDSPTVAYSV-LVVAK--VE--KGKSKKLKSVKELLGITIME RSSFEK | 1176 |
| WP_003030002 | 1094 | --ESD KLIPRKT-KNSYW-NPKKYGGFDSPVVAYSI-LVFAD--VE--KGKSKKLRKVQDMVGITIME KKRFEK | 1158 |
| WP_003065552 | 1122 | --DSD KLIPRKTKKA-YW-DTKKYGGFDSPTVAYSV-FVVAD--VE--KGKAKKLKTVKELVGISIME RSFFEE | 1186 |
| WP_001040076 | 1113 | --NSD KLIPRKT-KDIYL-DPKKYGGFDSPIVAYSV-LVVAD--IK--KGKAQKLKTVTELLGITIME RSRFEK | 1177 |
| WP_001040078 | 1121 | --NSD KLIPRKT-KDIYL-DPKKYGGFDSPIVAYSV-LVVAD--IK--KGKAQKLKTVTELLGITIME RSKFEK | 1185 |
| WP_001040080 | 1113 | --NSD KLIPRKT-KDIYL-DPKKYGGFDSPIVAYSV-LVVAD--IK--KGKAQKLKTVTELLGITIME RSRFEK | 1177 |
| WP_001040081 | 1113 | --NSD KLIPRKT-KDIYL-DPKKYGGFDSPIVAYSV-LVVAD--IK--KGKAQKLKTVTELLGITIME RSRFEK | 1177 |
| WP_001040083 | 1113 | --NSD KLIPRKT-KDIYL-DPKKYGGFDSPIVAYSV-LVVAD--IK--KGKAQKLKTVTELLGITIME RSRFEK | 1177 |
| WP_001040085 | 1113 | --NSD KLIPRKT-KDIYL-DPKKYGGFDSPIVAYSV-LVVAD--IK--KGKAQKLKTVTELLGITIME RSRFEK | 1177 |
| WP_001040087 | 1113 | --NSD KLIPRKT-KDIYL-DPKKYGGFDSPIVAYSV-LVVAD--IK--KGKAQKLKTVTELLGITIME RSRFEK | 1177 |
| WP_001040088 | 1113 | --NSD KLIPRKT-KDIYL-DPKKYGGFDSPIVAYSV-LVVAD--IK--KGKAQKLKTVTELLGITIME RSRFEK | 1177 |
| WP_001040089 | 1113 | --NSD KLIPRKT-KDIYL-DPKKYGGFDSPIVAYSV-LVVAD--IK--KGKAQKLKTVTELLGITIME RSRFEK | 1177 |
| WP_001040090 | 1113 | --NSD KLIPRKT-KDIYL-DPKKYGGFDSPIVAYSV-LVVAD--IK--KGKAQKLKTVTELLGITIME RSRFEK | 1177 |
| WP_001040091 | 1113 | --NSD KLIPRKT-KDIYL-DPKKYGGFDSPIVAYSV-LVVAD--IK--KGKAQKLKTVTELLGITIME RSRFEK | 1177 |
| WP_001040092 | 1113 | --NSD KLIPRKT-KDIYL-DPKKYGGFDSPIVAYSV-LVLAD--IK--KGKAQKLKTVKELIGITIME RERFEK | 1177 |
| WP_001040094 | 1113 | --NSD KLIPRKT-KDIYL-DPKKYGGFDSPIVAYSV-LVVAD--IK--KGKAQKLKTVTELLGITIME RSRFEK | 1177 |
| WP_001040095 | 1113 | --NSD KLIPRKT-KDIYL-DPKKYGGFDSPIVAYSV-LVVAD--IK--KGKAQKLKTVTELLGITIME RSRFEK | 1177 |
| WP_001040096 | 1113 | --NSD KLIPRKT-KDIYL-DPKKYGGFDSPIVAYSV-LVVAD--IK--KGKAQKLKTVTELLGITIME RSRFEK | 1177 |
| WP_001040097 | 1113 | --NSD KLIPRKT-KDIYL-DPKKYGGFDSPIVAYSV-LVVAD--IK--KGKAQKLKTVTELLGITIME RSRFEK | 1177 |
| WP_001040098 | 1113 | --NSD KLIPRKT-KDIYL-DPKKYGGFDSPIVAYSV-LVVAD--IK--KGKAQKLKTVTELLGITIME RSRFEK | 1177 |
| WP_001040099 | 1113 | --NSD KLIPRKT-KDIYL-DPKKYGGFDSPKVAYSV-LVVAD--IK--KGKAQKLKTVTELLGITIME RSRFEK | 1177 |
| WP_001040100 | 1113 | --NSD KLIPRKT-KDIYL-DPKKYGGFDSPIVAYSV-LVVAD--IK--KGKAQKLKTVTELLGITIME RSRFEK | 1177 |
| WP_001040104 | 1113 | --NSD KLIPRKT-KDIYL-DPKKYGGFDSPIVAYSV-LVVAD--IK--KGKAQKLKTVTELLGITIME RSRFEK | 1177 |
| WP_001040105 | 1113 | --NSD KLIPRKT-KDIYL-DPKKYGGFDSPIVAYSV-LVVAD--IK--KGKAQKLKTVTELLGITIME RSRFEK | 1177 |
| WP_001040106 | 1113 | --NSD KLIPRKT-KDIYL-DPKKYGGFDSPIVAYSV-LVVAD--IK--KGKAQKLKTVTELLGITIME RFRFEK | 1177 |
| WP_001040107 | 1113 | --NSD KLIPRKT-KDIYL-DPKKYGGFDSPIVAYSV-LVVAD--IK--KGKAQKLKTVTELLGITIME RFRFEK | 1177 |
| WP_001040108 | 1113 | --NSD KLIPRKT-KDIYL-DPKKYGGFDSPIVAYSV-LVVAD--IK--KGKAQKLKTVTELLGITIME RFRFEK | 1177 |
| WP_001040109 | 1113 | --NSD KLIPRKT-KDIYL-DPKKYGGFDSPIVAYSV-LVVAD--IK--KGKAQKLKTVTELLGITIME RFRFEK | 1177 |
| WP_001040110 | 1113 | --NSD KLIPRKT-KDIYL-DPKKYGGFDSPIVAYSV-LVVAD--IK--KGKAQKLKTVTELLGITIME RFRFEK | 1177 |
| WP_015058523 | 1113 | --NSD KLIPRKT-KDIYL-DPKKYGGFDSPIVAYSV-LVLAD--IK--KGKAQKLKTVKELIGITIME RERFEK | 1177 |
| WP_017643650 | 1113 | --NSD KLIPRKT-KDIYL-DPKKYGGFDSPIVAYSV-LVVAD--IK--KGKAQKLKTVTELLGITIME RSRFEK | 1177 |
| WP_017647151 | 1113 | --NSD KLIPRKT-KDIYL-DPKKYGGFDSPIVAYSV-LVVAD--IK--KGKAQKLKTVTELLGITIME RSRFEK | 1177 |
| WP_017648376 | 1113 | --NSD KLIPRKT-KDIYL-DPKKYGGFDSPIVAYSV-LVVAD--IK--KGKAQKLKTVTELLGITIME RSRFEK | 1177 |
| WP_017649527 | 1113 | --NSD KLIPRKT-KDIYL-DPKKYGGFDSPIVAYSV-LVVAD--IK--KGKAQKLKTVTELLGITIME RSRFEK | 1177 |
| WP_017771611 | 1113 | --NSD KLIPRKT-KDIYL-DPKKYGGFDSPIVAYSV-LVVAD--IK--KGKAQKLKTVTELLGITIME RFRFEK | 1177 |
| WP_017771984 | 1113 | --NSD KLIPRKT-KDIYL-DPKKYGGEDSPIVAYSV-LVAAD--IK--KGKAQKLKTVTELLGITIME RSRFEK | 1177 |
| CFQ25032 | 1113 | --NSD KLIPRKT-KDIYL-DPKKYGGFDSPIVAYSV-LVVAD--IK--KGKAQKLKTVTELLGITIME RSRFEK | 1177 |
| CFV16040 | 1113 | --NSD KLIPRKT-KDIYL-DPKKYGGFDSPIVAYSV-LVVAD--IK--KGKAQKLKTVTELLGITIME RSRFEK | 1177 |
| KLJ37842 | 1113 | --NSD KLIPRKT-KDIYL-DPKKYGGFDSPIVAYSV-LVVAD--IK--KGKAQKLKTVTELLGITIME RSRFEK | 1177 |
| KLJ72361 | 1113 | --NSD KLIPRKT-KDIYL-DPKKYGGFDSPIVAYSV-LVVAD--IK--KGKAQKLKTVTELLGITIME RSRFEK | 1177 |
| KLL20707 | 1127 | --NSD KLIPRKT-KDIYL-DPKKYGGFDSPIVAYSV-LVVAD--IK--KGKAQKLKTVTELLGITIME RSRFEK | 1191 |
| KLL42645 | 1113 | --NSD KLIPRKT-KDIYL-DPKKYGGFDSPIVAYSV-LVVAD--IK--KGKAQKLKTVTELLGITIME RFRFEK | 1177 |
| WP_047207273 | 1113 | --NSD KLIPRKT-KDIYL-DPKKYGGFDSPIVAYSV-LVVAD--IK--KGKAQKLKTVTELLGITIME RSRFEK | 1177 |
| WP_047209694 | 1113 | --NSD KLIPRKT-KDIYL-DPKKYGGFDSPIVAYSV-LVVAD--IK--KGKAQKLKTVTELLGITIME RSRFEK | 1177 |
| WP_050198062 | 1113 | --NSD KLIPRKT-KDIYL-DPKKYGGFDSPIVAYSV-LVVAD--IK--KGKAQKLKTVTELLGITIME RSRFEK | 1177 |
| WP_050201642 | 1113 | --NSD KLIPRKT-KDIYL-DPKKYGGFDSPIVAYSV-LVVAD--IK--KGKAQKLKTVTELLGITIME RSRFEK | 1177 |
| WP_050204027 | 1113 | --NSD KLIPRKT-KDIYL-DPKKYGGFDSPIVAYSV-LVVAD--IK--KGKAQKLKTVTELLGITIME RFRFEK | 1177 |
| WP_050881965 | 1113 | --NSD KLIPRKT-KDIYL-DPKKYGGFDSPIVAYSV-LVVAD--IK--KGKAQKLKTVTELLGITIME RSRFEK | 1177 |
| WP_050886065 | 1113 | --NSD KLIPRKT-KDIYL-DPKKYGGFDSPIVAYSV-LVVAD--IK--KGKAQKLKTVTELLGITIME RSRFEK | 1177 |
| AHN30376 | 1113 | --NSD KLIPRKT-KDIYL-DPKKYGGFDSPIVAYSV-LVLAD--IK--KGKAQKLKTVKELIGITIME RERFEK | 1177 |
| EAO78426 | 1113 | --NSD KLIPRKT-KDIYL-DPKKYGGFDSPIVAYSV-LVVAD--IK--KGKAQKLKTVTELLGITIME RSRFEK | 1177 |
| CCW42055 | 1113 | --NSD KLIPRKT-KDIYL-DPKKYGGFDSPIVAYSV-LVVAD--IK--KGKAQKLKTVTELLGITIME RSRFEK | 1177 |
| WP_003041502 | 1123 | --DSS ENLVGVK-RNL---DPKKYGGYAGISNSYAV-LVKAI--IE--KGVKKKETMVLEFQGISILD RITFEK | 1185 |
| WP_037593752 | 1095 | --ESD KLIPRKT-KNSYW-NPKKYGGFDSPVVAYSI-LVFAD--VE--KGKSKKLRKVQDMVGITIME KKRFEK | 1159 |
| WP_049516684 | 1095 | --ESD KLIPRKT-KNSYW-NPKKYGGFDSPVVAYSI-LVFAD--VE--KGKSKKLRKVQDMVGITIME KKRFEK | 1159 |
| GAD46167 | 1094 | --ESD KLIPRKT-KNSYW-NPKKYGGFDSPVVAYSI-LVFAD--VE--KGKSKKLRKVQDMVGITIME KKRFEK | 1158 |
| WP_018363470 | 1126 | --DSD KLIPRKTKKV-LW-EPKKYGGFDSPTVAYSV-LVVAD--VE--KGKTKKLKTVKELVGISIME RSFFEK | 1190 |
| WP_003043819 | 1124 | --ESA KLIP----RKKGW-DTRKYGGFGSPTVAYSI-LVVAK--VE--KGKAKKLKSVKVLVGITIME KGSYEK | 1185 |
| WP_006269658 | 1094 | --ESD KLIPRKT-KNSYW-DPKKYGGFDSPVVAYSI-LVFAD--VE--KGKSKKLRKVQDMVGITIME KKRFEK | 1158 |
| WP_048800889 | 1114 | --DSD KLIARKTKEN-YW-DTKKYGGFDSPTVAYSV-LVVAD--IK--KGKAKKLKTVKELVGISIME RPFFEK | 1178 |
| WP_012767106 | 1114 | --SFD KLIS----RKHRF-ESSKYGGFGSPTVTYSV-LVVAKskVQ--DGKVKKIKTGKELIGMTLLD KLVFEK | 1177 |
| WP_014612333 | 1114 | --SFD KLIS----RKHRF-ESSKYGGFGSPTVTYSV-LVVAKSKVQ--DGKVKKIKTGKELIGITLLD KLVFEK | 1177 |
| WP_015017095 | 1114 | --SFD KLIS----RKHRF-ESSKYGGFGSPTVTYSV-LVVAKskVQ--DGKVKKIKTGKELIGITLLD KLVFEK | 1177 |
| WP_015057649 | 1114 | --SED KLIS----RKHRF-ESSKYGGFGSPTVTYSV-LVVAKskVQ--DGKVKKIKTGKELIGITLLD KLVFEK | 1177 |
| WP_048327215 | 1114 | --SFD KLIS----RKHRF-ESSKYGGFGSPTVTYSV-LVVAKckVQ--DGKVKKIKTGKELIGITLLD KLVFEK | 1177 |
| WP_049519324 | 1114 | --SFD KLIS----RKHRF-ESSKYGGFGSPTVTYSV-LVVAKskVQ--DGKVKKIKTGKELIGITLLD KLVFEK | 1177 |
| WP_012515931 | 1095 | --NSD KLIP----RKNNW-DTRKYGGFDSPTVAYSV-LVIAK--ME--KGKAKVLKPVKEMVGITIME RTAFEE | 1156 |
| WP_021320964 | 1095 | --NSD KLIP----RKNNW-DTRKYGGFDSPTVAYSV-LVIAK--ME--KGKAKVLKPVKEMVGITIME RIAFEE | 1156 |
| WP_037581760 | 1095 | --NSD KLIP----RKNNW-DTRKYGGFDSPTVAYSV-LVIAK--ME--KGKAKVLKPVKEMVGITIME RIAFEE | 1156 |
| WP_004232481 | 1124 | --DSD KLIPRKTKKL-QW-ETQKYGGFDSPTVAYSV-LVVAD--VE--KGKTRKLKTVKELVGISIME RSSFEE | 1188 |
| WP_009854540 | 1119 | --DSD KLIPRKTKKV-YW-DTKKYGGFDSPTVAYSV-FVVAD--VE--KGKAKKLKTVKELVGISIME RSFFEE | 1183 |
| WP_012962174 | 1120 | --NSD KLIPRKTKKF-RW-DTPKYGGFDSPNIAYSV-FVIAD--VE--KGKAKKLKTVKELVGISIME RSSFEE | 1184 |
| WP_039695303 | 1121 | --DSD KLIPRKTKKV-YW-DTKKYGGFDSPTVAYSV-FVVAD--VE--KGKAKKLKTVKELVGISIME RSFFEE | 1185 |
| WP_014334983 | 1124 | --DSD KLIPRKTKKV-YW-NTKKYGGFDSPTVAYSV-LVVAD--IE--KGKAKKLKTVKELVGISIME RSFFEE | 1188 |
| WP_003099269 | 1115 | --DSD KLIA----RKKSW-DPKKYGGFDSPIIAYSV-LVVAK--IA--KGKTQKLKTIKELVGIKIME QDEFEK | 1176 |
| AHY15608 | 1115 | --DSD KLIA----RKKSW-DPKKYGGFDSPIIAYSV-LVVAK--IA--KGKTQKLKTIKELVGIKIME QDEFEK | 1176 |
| AHY17476 | 1115 | --DSD KLIA----RKKSW-DPKKYGGFDSPIIAYSV-LVVAK--IA--KGKTQKLKTIKELVGIKIME QDEFEK | 1176 |
| ESR09100 | 1 | ----- -------------------------------------------------------------ME QDEFEK | 8 |
| AGM98575 | 1115 | --DSD KLIA----RKKSW-DPKKYGGFDSPIIAYSV-LVVAK--IA--KGKTQKLKTIKELVGIKIME QDEFEK | 1176 |
| ALF27331 | 1094 | --NSD KLIPRKT-KKFYW-DTKKYGGFDSPIVAYSI-LVIAN--IE--KGKSKKLKLVKDLVGITIME RTIFEK | 1158 |
| WP_018372492 | 1109 | ---NN KLIP----RKKDW-SVDKYGGFIEPAESYSLaIFYTD--IN-----GKKPKKKSTIIAISRME KKDYEK | 1167 |
| WP_045618028 | 1125 | VVDAS KLTPIKS-G---L-SPEKYGGYARPTIAYSV-LVIAD--IE--KGKAKKLKRIKEMVGITVQD KKKFEA | 1188 |
| WP_045635197 | 1119 | --NSD KLIPRKT-KDILL-DTTKYGGFDSPVIAYSI-LLIAD--IE--KGKAKKLKTVKTLVGITIME KAAFEE | 1183 |
| WP_002263549 | 1094 | --NSD KLIPRKT-KKFYW-DTKKYGGFDSPIVAYSI-LVIAD--IE--KGKSKKLKTVKALVGVTIME KMTFER | 1158 |
| WP_002263887 | 1094 | --NSD KLIPRKT-KKFYW-DTKKYGGFDSPIVAYSI-LVIAD--IE--KGKSKKLKTVKALVGVTIME KMTFER | 1158 |
| WP_002264920 | 1094 | --DSD KLIPRKT-KKFYW-DTKKYGGFDSPIVAYSI-LVIAD--IE--KGKSKKLKTVKALVGVTIME KMTFER | 1158 |
| WP_002269043 | 1094 | --NSD KLIPRKT-KKFYW-DTKKYGGFDSPIVAYSI-LVIAD--IE--KGKSKKLKTVKALVGVTIME KMTFER | 1158 |
| WP_002269448 | 1094 | --NSD KLIPRKT-KKFYW-DTKKYGGFDSPIVAYSI-LVIAD--IE--KGKSKKLKTVKALVGVTIME KMTFER | 1158 |
| WP_002271977 | 1094 | --NSD KLIPRKT-KKFYW-DTKKYGGFDSPIVAYSI-LVIAD--IE--KGKSKKLKTVKALVGVTIME KMTFER | 1158 |
| WP_002272766 | 1094 | --NSD KLIPRKT-KKFYW-DTKKYGGFDSPIVAYSI-LVIAD--IE--KGKSKKLKTVKALVGVTIME KMTFER | 1158 |
| WP_002273241 | 1094 | --NSD KLIPRKT-KKFYW-DTKKYGGFDSPIVAYSI-LVIAD--IE--KGKSKKLKTVKALVGVTIME KMTFER | 1158 |
| WP_002275430 | 1094 | --NSD KLIPRKT-KKFYW-DTKKYGGFDSPIVAYSI-LVIAD--IE--KGKSKKLKTVKALVGVTIME KMTFER | 1158 |
| WP_002276448 | 1094 | --NSD KLIPRKT-KKFYW-DTKKYGGFDSPIVAYSI-LVIAD--IE--KGKSKKLKTVKALVGVTIME KMTFER | 1158 |
| WP_002277050 | 1112 | --PLE KLVPLKK----AL-NPEKYGGYOKPTTAYPI-LLIVD---------------TKQLIPISVMD KKRFEQ | 1166 |
| WP_002277364 | 1094 | --NSD KLIPRKT-KKFYW-DTKKYGGFDSPIVAYSI-LVIAD--IE--KGKSKKLKTVKALVGVTIME KMTFER | 1158 |
| WP_002279025 | 1094 | --NSD KLIPRKT-KKFYW-DTKKYGGFDSPIVAYSI-LVIAD--IE--KGKSKKLKTVKALVGVTIME KMTFER | 1158 |
| WP_002279859 | 1094 | --DSD KLIPRKT-KKFYW-DTKKYGGFDSPIVAYSI-LVIAD--IE--KGKSKKLKTVKALVGVTIME KMTFER | 1158 |
| WP_002280230 | 1094 | --NSD KLIPRKT-KKFYW-DTKKYGGFDSPIVAYSI-LVIAD--IE--KGKSKKLKTVKALVGVTIME KMTFER | 1158 |
| WP_002281696 | 1094 | --NSD KLIPRKT-KKFYW-DTKKYGGFDSPIVAYSI-LVIAD--IE--KGKSKKLKTVKALVGVTIME KMTFER | 1158 |
| WP_002282247 | 1112 | --PLE KLVPLKK----AL-NPEKYGGYQKPTTAYPI-LLIVD---------------TKQLIPISVMD KKRFEQ | 1166 |
| WP_002282906 | 1094 | --NSD KLIPRKT-KKFYW-DTKKYGGFDSPIVAYSI-LVIAD--IE--KGKSKKLKTVKALVGVTIME KMTFER | 1158 |
| WP_002283846 | 1094 | --NSD KLIPRKT-KKFYW-DTKKYGGFDSPIVAYSI-LVIAD--IE--KGKSKKLKTVKALVGVTIME KMTFER | 1158 |
| WP_002287255 | 1094 | --NSD KLIPRKT-KKFYW-DTKKYGGFDSPIVAYSI-LVIAD--IE--KGKSKKLKTVKALVGVTIME KMTFER | 1158 |
| WP_002288990 | 1094 | --NSY KLIPRKT-KKFYW-DTKKYGGFDSPIVAYSI-LVIAD--IE--KGKSKKLKTVKALVGVTIME KMTFER | 1158 |
| WP_002289641 | 1094 | --NSD KLIPRKT-KKFYW-DTKKYGGFDSPIVAYSI-LVIAD--IE--KGKSKKLKTVKALVGVTIME KMTFER | 1158 |
| WP_002290427 | 1094 | --DSD KLIPRKT-KKFYW-DTKKYGGFDSPIVAYSI-LVIAD--IE--KGKSKKLKTVKALVGVTIME KMTFER | 1158 |
| WP_002295753 | 1094 | --NSD KLIPRKT-KKFYW-DTKKYGGFDSPIVAYSI-LVIAD--IE--KGKSKKLKTVKALVGVTIME KMTFER | 1158 |
| WP_002296423 | 1094 | --NSD KLIPRKT-KKFYW-DTKKYGGFDSPIVAYSI-LVIAD--IE--KGKSKKLKTVKALVGVTIME KMTFER | 1158 |
| WP_002304487 | 1108 | --NSD KLIPRKT-KKFYW-DTKKYGGFDSPIVAYSI-LVIAD--IE--KGKSKKLKTVKALVGVTIME KMTFER | 1172 |
| WP_002305844 | 1094 | --NSD KLIPRKT-KKFYW-DTKKYGGFDSPIVAYSI-LVIAD--IE--KGKSKKLKTVKALVGVTIME KMTFER | 1158 |
| WP_002307203 | 1094 | --NSD KLIPRKT-KKFYW-DTKKYGGFDSPIVAYSI-LVIAD--IE--KGKSKKLKTVKALVGVTIME KMTFER | 1158 |
| WP_002310390 | 1094 | --DSD KLIPRKT-KKFYW-DTKKYGGFDSPIVAYSI-LVIAD--IE--KGKSKKLKTVKALVGVTIME KMTFER | 1158 |
| WP_002352408 | 1094 | --DSD KLIPRKT-KKFYW-DTKKYGGFDSPIVAYSI-LVIAD--IE--KGKSKKLKTVKALVGVTIME KMTFER | 1158 |
| WP_012997688 | 1094 | --NSD KLIPRKT-KKFYW-DTKKYGGFDSPIVAYSI-LVIAD--IE--KGKSKKLKTVKALVGVTIME KMTFER | 1158 |
| WP_014677909 | 1094 | --NSD KLIPRKT-KKFYW-DTKKYGGFDSPIVAYSI-LVIAD--IE--KGKSKKLKTVKALVGVTIME KMTFER | 1158 |
| WP_019312892 | 1094 | --NSD KLIPRKT-KKFYW-DTKKYGGFDSPIVAYSI-LVIAD--IE--KGKSKKLKTVKALVGVTIME KMTFER | 1158 |
| WP_019313659 | 1094 | --NSD KLIPRKT-KKFYW-DTKKYGGFDSPIVAYSI-LVIAD--IE--KGKSKKLKTVKALVGVTIME KMTFER | 1158 |
| WP_019314093 | 1094 | --NSD KLIPRKT-KKFYW-DTKKYGGFDSPIVAYSI-LVIAD--IE--KGKSKKLKTVKALVGVTIME KMTFER | 1158 |
| WP_019315370 | 1094 | --NSD KLIPRKT-KKFYW-DTKKYGGFDSPIVAYSI-LVIAD--IE--KGKSKKLKTVKALVGVTIME KMTFER | 1158 |
| WP_019803776 | 1094 | --NSD KLIPRKT-KKFYW-DTKKYGGFDSPIVAYSI-LVIAD--IE--KGKSKKLKTVKALVGVTIME KMTFER | 1158 |
| WP_019805234 | 1094 | --DSD KLIPRKT-KKFYW-DTKKYGGFDSPIVAYSI-LVIAD--IE--KGKSKKLKTVKALVGVTIME KMTFER | 1158 |
| WP_024783594 | 1094 | --NSD KLIPRKT-KKFYW-DTKKYGGFDSPIVAYSI-LVIAD--IE--KSKSKKLKTVKALVGVTIME KMTFER | 1158 |
| WP_024784288 | 1112 | --PLE KLVPLKK----AL-NPEKYGGYQKPTTAYPI-LLIVD---------------TKQLIPISVMD KKRFEQ | 1166 |
| WP_024784666 | 1094 | --NSD KLIPRKT-KKFYW-DTKKYGGFDSPIVAYSI-LVIAD--IE--KGKSKKLKTVKALVGVTIME KMTFER | 1158 |
| WP_024784894 | 1094 | --NSD KLIPRKT-KKFYW-DTKKYGGFDSPIVAYSI-LVIAD--IE--KGKSKKLKTVKALVGVTIME KMTFER | 1158 |
| WP_024786433 | 1112 | --PLE KLVPLKK----AL-NPEKYGGYQKPTTAYPI-LLIVD---------------TKQLIPISVMD KKRFEQ | 1166 |
| WP_049473442 | 1094 | --NSD KLIPRKT-KKFYW-DTKKYGGFDSPIVAYSI-LVIAD--IE--KGKSKKLKTVKALVGVTIME KMTFER | 1158 |
| WP_049474547 | 1094 | --NSD KLIPRKT-KKFYW-DTKKYGGEDSPIVAYSI-LVIAD--IE--KGKSKKLKTVKALVGVTIME KMTFER | 1158 |
| EMC03581 | 1087 | --NSD KLIPRKT-KKFYW-DTKKYGGFDSPIVAYSI-LVIAD--IE--KGKSKKLKTVKALVGVTIME KMTFER | 1151 |
| WP_000428612 | 1122 | --NSD KLIPRKT-KDILW-DTTKYGGFDSPVIAYSI-LLIAD--IE--KGKAKRLKTVKTLVGITIME KATFEK | 1186 |
| WP_000428613 | 1120 | --NSD KLIPRKT-KDILW-ETTKYGGFDSPVIAYSI-LLIAD--IE--KGKAKKLKTVKTLVGITIME KAAFEE | 1184 |
| WP_049523028 | 1115 | --NSD KLIPRKT-KNVQL-DTTKYGGFDSPVIAYSI-LLVAD--VE--KGKSKKLKTVKSLIGITIME KVKFEA | 1179 |
| WP_003107102 | 1084 | --DSD KLIP----RKNNW-DPKKYGGFGSPIIAYSV-LVVAK--VT--KGKSQKTKSVKELVGITIME QNEFEK | 1145 |
| WP_054279288 | 1116 | --KSS KLIP----RKNKWrDTTKYGGFNTPTVAYSV-LVVAK--VE--KGKAKKLKPVKELVGITIME RTKFEA | 1178 |
| WP_049531101 | 1125 | vvDAS KLIPIKS-G---L-SPEKYGGYARPTIAYSV-LVIAD--IE--KGKAKKLKRIKEMVGITIQD KKKFEA | 1188 |
| WP_049538452 | 1125 | vvDAS KLIPIKS-G---L-SPEKYGGYARPTIAYSV-LVIAD--IE--KGKTKKLKRIKEMIGITVQD KKIFES | 1188 |
| WP_049549711 | 1127 | vvDAS KLIPIKS-G---L-SPEKYGGYARPTIAYSV-LVIAD--IE--KGKTKKLKRIKEMVGITIQD KKKFEA | 1190 |
| WP_007896501 | 1121 | --NSD KLIE----RKKGW-DPKKYGGFDSPNTAYSI-FVVAK--VA--KRKAQKLKTVKEIVGITIME QAEYEK | 1182 |
| EFR44625 | 1073 | --NSD KLIE----RKKGW-DPKKYGGFDSPNTAYSI-FVVAK--VA--KRKAQKLKTVKEIVGITIME QAEYEK | 1134 |
| WP_002897477 | 1119 | --NSD KLIPRKT-KDILW-DTTKYGGFDSPVIAYSI-LLIAD--IE--KGKAKKLKTVKTLVGITIME KAAFEE | 1183 |
| WP_002906454 | 1124 | vvDAS KLIPIKS-S---L-SPEKYGGYARPTIAYSV-LVIAD--IEkgKGKAKKLKRIKEIVGITIQD KKKFES | 1189 |
| WP_009729476 | 1120 | --NSD KLIPRKT-KDILW-DTTKYGGFDSPVIAYSI-LLIAD--IE--KGKAKKLKTVKTLVGITIME KDAFEK | 1184 |
| COR24647 | 1110 | --GSD KLIARKT-KNNYL-STQKYGGFDSPTVAYSI-MFVAD--IE--KGKSKRLKTVKEMIGITIME RSRFES | 1174 |
| WP_000066813 | 1124 | --NSD KLIPRKT-KEILW-DTTKYGGFDSPVIAYSI-LLIAD--IE--KGKAKKLKTVKTLVGITIME KATFEK | 1188 |
| WP_009754323 | 1120 | --NSD KLIPRKT-KDILW-DTTKYGGFDSPVIAYSI-LLIAD--IE--KGKAKKLKTVKTLVGITIME KAAFEK | 1184 |
| WP_044674937 | 1113 | --DSD KLIPRKT-EKFYL-DTKKYGGFDSPTIAYSV-LLIAD--IE--KGKAKKLKRVKELIGITIME RMAFEK | 1177 |
| WP_044676715 | 1115 | --DSD KLIPRKT-EKFYL-DTKKYGGFDSPTIAYSV-LLIAD--IE--KGKAKKLKRVKELIGITIME RMAFEK | 1179 |
| WP_044680361 | 1115 | --DSD KLIPRKT-EKFYL-DTKKYGGFDSPTIAYSV-LLIAD--IE--KGKAKKLKRVKELIGITIME RMAFEK | 1179 |
| WP_044681799 | 1113 | --DSD KLIPRKT-EKFYL-DTKKYGGFDSPTIAYSV-LLIAD--IE--KGKAKKLKRVKELIGITIME RMAFEK | 1177 |
| WP_049533112 | 1123 | --DSS ENLVGVK-RNL---DPKKYGGYAGISNSYAV-LVKAI--IE--KGVKKKETMVLEFQGISILD RITFEK | 1185 |
| WP_029090905 | 1062 | --SSS KTIP----LKKHL-DTAIYGGYTAVNYASYA---LIQ--FK----KGRKLK--REIIGIPLAV QTRIDN | 1117 |
| WP_006506696 | 1085 | haDKG AVVP---vNKNRS-DVHKYGGFSG--LQYTI----VA--IEgqKKKGKKTELVKKISGVPLHL KAASIN | 1149 |
| AIT42264 | 1115 | --NSD KLIA----RKKDW-DPKKYGGFDSPTVAYSV-LVVAK--VE--KGKSKKLKSVKELLGITIME RSSFEK | 1176 |
| WP_034440723 | 1093 | k-KTE KRIP----IKNNL-DPNIYGGYIEEKMAYYI----AInyLE--NGKTKK-----AIVGISIKD KKDFEG | 1149 |
| AKQ21048 | 1115 | --NSD KLIA----RKKDW-DPKKYGGFDSPTVAYSV-LVVAK--VE--KGKSKKLKSVKELLGITIME RSSFEK | 1176 |
| WP_004636532 | 1093 | --DSS KLIP----VKEGM-DPQKYGGLSQVSEAFAV-VIT----HE--KGKKKQLK--SDLISIPIVD QKAYEQ | 1150 |
| WP_002364836 | 1099 | --PSN KLIP----VKNGL-DPQKYGGFDSPIVAYTV-LF--T--HE--KGK-KPL-IKQEILGITIME KTRFEQ | 1156 |
| WP_016631044 | 1050 | --PSN KLIP----VKNGL-DPQKYGGFDSPVVAYTV-LF--T--HE--KGK-KPL-IKQEILGITIME KTRFEQ | 1107 |
| EMS75795 | 835 | --KPD KLIQ----RKAGW-DVSKYGGFGSPVVAYAV-AFI----YE--KGKAR--KKAKAIEGITIMK QSLFEQ | 892 |
| WP_002373311 | 1099 | --PSN KLIP----VKNGL-DPQKYGGFDSPVVAYTV-LF--T--HE--KGK-KPL-IKQEILGITIME KTRFEQ | 1156 |
| WP_002378009 | 1099 | --PSN KLIP----VKNGL-DPQKYGGFDSPIVAYTV-LF--T--HE--KGK-KPL-IKQEILGITIME KTRFEQ | 1156 |
| WP_002407324 | 1099 | --PSN KLIP----VKNGL-DPQKYGGFDSPIVAYTV-LF--T--HE--KGK-KPL-IKQEILGITIME KTRFEQ | 1156 |
| WP_002413717 | 1099 | --PSN KLIP----VKNGL-DPQKYGGFDSPVVAYTV-LF--T--HE--KGK-KPL-IKQEILGITIME KTRFEQ | 1156 |
| WP_010775580 | 1101 | --PSN KLIP----VKNGL-DPQKYGGFDSPVVAYTV-LF--T--HE--KGK-KPL-IKQEILGITIME KTRFEQ | 1158 |
| WP_010818269 | 1099 | --PSN KLIP----VKNGL-DPQKYGGFDSPIVAYTV-LF--T--HE--KGK-KPL-IKQEILGITIME KTRFEQ | 1156 |
| WP_010824395 | 1099 | --PSN KLIP----VKNGL-DPQKYGGFDSPVVAYTV-LF--T--HE--KGK-KPL-IKQEILGITIME KTRFEQ | 1156 |
| WP_016622645 | 1099 | --PSN KLIP----VKNGL-DPQKYGGFDSPIVAYTV-LF--T--HE--KGK-KPL-IKQEILGITIME KTRFEQ | 1156 |
| WP_033624816 | 1099 | --PSN KLIP----VKNGL-DPQKYGGFDSPVVAYTV-LF--T--HE--KGK-KPL-IKQEILGITIME KTRFEQ | 1156 |
| WP_033625576 | 1099 | --PSN KLIP----VKNGL-DPQKYGGFDSPVVAYTV-LF--T--HE--KGK-KPL-IKQEILGITIME KTKFEQ | 1156 |
| WP_033789179 | 1099 | --PSN KLIP----VKNGL-DPQKYGGFDSPVVAYTV-LF--T--HE--KGK-KPL-IKQEILGITIME KTRFEQ | 1156 |
| WP_002310644 | 1101 | --DSS KLLP----RKNNW-DPAKYGGLGSPNVAYTV-AFT----YE--KGKAR--KRTNALEGITIME REAFEQ | 1158 |
| WP_002312694 | 1102 | --DSS KLLP----RKNNW-DPAKYGGLGSPNVAYTV-AFT----YE--KGKAR--KRTNALEGITIME REAFEQ | 1159 |
| WP_002314015 | 1102 | --DSS KLLP----RKNNW-DPAKYGGLGSPNVAYTV-AFT----YE--KGKAR--KRTNALEGITIME REAFEQ | 1159 |
| WP_002320716 | 1102 | --DSS KLLP----RKNNW-DPAKYGGLGSPNVAYTV-AFT----YE--KGKAR--KRTNALEGITIME REAFEQ | 1159 |
| WP_002330729 | 1101 | --DSS KLLP----RKNNW-DPAKYGGLGSPNVAYTV-AFT----YE--KGKAR--KRTNALEGITIME REAFEQ | 1158 |
| WP_002335161 | 1102 | --DSS KLLP----RKNNW-DPAKYGGLGSPNVAYTV-AFT----YE--KGKAR--KRTNALEGITIME REAFEQ | 1159 |
| WP_002345439 | 1102 | --DSS KLLP----RKNNW-DPTKYGGLGSPNVAYTV-AFT----YE--KGKAR--KRTNALEGITIME REAFEQ | 1159 |
| WP_034867970 | 1092 | --KPD KLIE----RKNNW-DVTKYGGFGSPVIAYAI-AFV----YA--KGKTQ--KKTRAIEGITIME QAAFEK | 1149 |
| WP_047937432 | 1102 | --DSS KLLP----RKNNW-DPAKYGGLGSPNVAYTV-AFT----YE--KGKAR--KRTNALEGITIME REAFEQ | 1159 |
| WP_010720994 | 1092 | --KPD KLIE----RKNNW-DVTKYGGFGSPVIAYAI-AFV----YA--KGKTQ--KKTKAIEGITIME QAAFEK | 1149 |
| WP_010737004 | 1092 | --KPD KLIE----RKNNW-DVTKYGGFGSPVIAYAI-AFV----YA--KGKTQ--KKTRAIEGITIME QAAFEK | 1149 |
| WP_034700478 | 1092 | --KPD KLIE----RKNNW-DVTKYGGFGSPVIAYAI-AFV----YA--KGKTQ--KKTRAIEGITIME QAAFEK | 1149 |
| WP_007209003 | 1090 | --ESQ KLIR----RKQQW-NTKKYGGFDSPVVAYAI---LLS--FD--KGK-RKARSFK-IVGITIQD RESFEG | 1147 |
| WP_023519017 | 1086 | --NPE KLIP----RKASL-DPLKYGGYGSPLVAYTV-IFI----FE--KGKQK--KVTKGIEGITVME QLRFEQ | 1143 |
| WP_010770040 | 1097 | --DSD KLIS----RKTNW-SPKLYGGFDSPQVAYSV-II--T--YE--KGK-KKVRA-KAIVGITIME QSLFKK | 1154 |
| WP_048604708 | 1094 | --DSD KLIS----RKKEW-DTTKYGGFDSPNVAYSV-VI--R--YE--KGK-TRKLV-KTIVGITIME RAAFEK | 1151 |
| WP_010750235 | 1095 | --KPD KLIK----RKNNW-DVTKYGGFGSPVVAYAV-VFT----YE--KGKNH--KKAKAIEGITIME QALFEK | 1152 |
| AII16583 | 1154 | --NSD KLIA----RKKDW-DPKKYGGFDSPTVAYSV-LVVAK--VE--KGKSKKLKSVKELLGITIME RSSFEK | 1215 |
| WP_029073316 | 1100 | hsEKG AKVP---vNKLRS-NVHKYGGFEG--LKYSI----VA--IKgkKKKGKKIIDVNKLVGIPLMY KNVDDE | 1164 |
| WP_031589969 | 1100 | nsDKD ATVP---vNKYRS-NVNKYGGFSG--VNSFI----VA--IKgkKKKGKKVIEVNKLTGIPLMY KNADEE | 1164 |
| KDA45870 | 1079 | --DSG KLLP----RKEGL-DPVKYGGYAKAVESYAV-LITAD-eVK--KGKTKKVKT---LVNIPIID SKKYEA | 1138 |
| WP_039099354 | 1098 | k-ASG QLIPAKQdRPTAL-----YGGYSGKTVAYMC---IVR--IKnkKGDLYKVCGVETSWLAQLKQ KKAFLK | 1170 |
| AKP02966 | 1119 | k---- KLIA----QKKDM-DPNIYGGFSGDNKSSIT---IVK--ID-----NNKIKPVA--IPIRLIN ----DK | 1172 |
| WP_010991369 | 1096 | --NSS KLIP----RKTNW-DPMKYGGLDSPNMAYAV-VI--E--YA--KGK-NKLVFEKKIIRVTIME RKAFEK | 1154 |
| WP_033838504 | 1096 | --NSS KLIS----RKTNW-DPMKYGGLDSPNMAYAV-VI--E--YA--KGK-NKLVFEKKIIRVTIME RKAFEK | 1154 |
| EHN60060 | 1099 | --NSS KLIS----RKTNW-DPMKYGGLDSPNMAYAV-VI--E--YA--KGK-NKLVFEKKIIRVTIME RKAFEK | 1157 |
| EFR89594 | 865 | --NSS KLIP----RKTNW-DPMKYGGLDSPNMAYAV-VI--E--YA--KGK-NKLVFEKKIIRVTIME RKAFEK | 923 |
| WP_038409211 | 1096 | --NSS KLIS----RKADW-NPIKYGGFDGSNMAYSI-VI--E--YE--KRK-KKTVIKKELIQINIME RVAFEK | 1154 |
| EFR95520 | 715 | --NSS KLIS----RKADW-NPIKYGGFDGSNMAYSI-VI--E--YE--KRK-KKTVIKKELIQINIME RVAFEK | 773 |
| WP_003723650 | 1096 | --NSS KLIP----RKENW-DPMKYGGLDSPNMAYAV-II--E--HA--KGK-KKIVIEKKLIQINIME RKMFEK | 1154 |
| WP_003727705 | 1096 | --NSS KLIP----RKENW-DPMKYGGLDSPNMAYAV-II--E--HA--KGK-KKIVIEKKLIQINIME RKMFEK | 1154 |
| WP_003730785 | 1096 | --NSS KLIP----RKENW-DPVKYGGLDSPNMAYAV-II--E--HA--KGK-KKIVIEKKLIQINIME RKMFEK | 1154 |
| WP_003733029 | 1096 | --KSN KLIP----RKKDW-DPIKYGGFDGSKMAYAI-II--E--YE--KQK-RKVRIEKKLIQINIME REAFEK | 1154 |
| WP_003739838 | 1096 | --NSS KLIP----RKENW-DPMKYGGLDSPNMAYAV-II--E--HA--KGK-KKVVFEKKIIRITIME RKAFEK | 1154 |
| WP_014601172 | 1096 | --NSS KLIP----RKENW-DPMKYGGLDSPNMAYAV-II--E--HA--KGK-KKLIFEKKIIRITIME RKMFEK | 1154 |
| WP_023548323 | 1096 | --DSS KLIP----KKTNL-NPIKYGGFEGSNMAYAI-II--E--HE--KRK-KKVTIEKKLIQINIME RKAFEK | 1154 |
| WP_031665337 | 1096 | --NSS KLIP----RKENW-DPMKYGGLDSPNMAYAV-II--E--HA--KGK-KRIVIEKKLIQINIME RKMFEK | 1154 |
| WP_031669209 | 1096 | --KSN KLIP----RKKDW-DPIKYGGFDGSKMAYAI-II--E--YE--KQK-RKVRIEKKLIQINIME REAFEK | 1154 |
| WP_033920898 | 1096 | --DSS KLIP----KKTNL-NPIKYGGFEGSNMAYAI-II--E--HE--KRK-KKVTIEKKLIQINIME RKAFEK | 1154 |
| AKI42028 | 1099 | --NSS KLIP----RKENW-DPMKYGGLDSPNMAYAV-II--E--HA--KGK-KKLIFEKKIIRITIME RKMFEK | 1157 |
| AKI50529 | 1099 | --DSS KLIP----KKTNL-NPIKYGGFEGSNMAYAI-II--E--HE--KRK-KKVTIEKKLIQINIME RKAFEK | 1157 |
| EFR83390 | 544 | --NSS KLIP----RKENW-DPMKYGGLDSPNMAYAV-II--E--HA--KGK-KKIVIEKKLIQINIME RKMFEK | 602 |
| WP_046323366 | 1096 | --NSS KLIP----RKADW-DPIKYGGFDGSNMAYAI-VI--E--HE--KRK-KKTVIKKELIQINIME RTAFEK | 1154 |
| AKE81011 | 1131 | --NSD KLIA----RKKDW-DPKKYGGFDSPTVAYSV-LVVAK--VE--KGKSKKLKSVKELLGITIME RSSFEK | 1192 |
| CUO82355 | 1089 | hsAKG AVIP---vNKNRK-DVNKYGGFSG--LQYVI----AA--IEgtKKKGKKLVKVRKLSGIPLYL KQADIK | 1153 |
| WP_033162887 | 1090 | hsEKG ATVP---1NKYRA-DVHKYGGFGN--VOSII----VA--IEgkKKKGKKLIDVRKLTSIPLHL KNAPVE | 1154 |
| AGZ01981 | 1148 | --NSD KLIA----RKKDW-DPKKYGGFDSPTVAYSV-LVVAK--VE--KGKSKKLKSVKELLGITIME RSSFEK | 1209 |
| AKA60242 | 1115 | --NSD KLIA----RKKDW-DPKKYGGFDSPTVAYSV-LVVAK--VE--KGKSKKLKSVKELLGITIME RSSFEK | 1176 |
| AKS40380 | 1115 | --NSD KLIA----RKKDW-DPKKYGGFDSPTVAYSV-LVVAK--VE--KGKSKKLKSVKELLGITIME RSSFEK | 1176 |
| 4UN5_B | 1119 | --NSD KLIA----RKKDW-DPKKYGGFDSPTVAYSV-LVVAK--VE--KGKSKKLKSVKELLGITIME RSSFEK | 1180 |
| WP_010922251 | 1177 | [chemical structure] | 1239 |
| WP_039695303 | 1186 | NPV---EFLE---NKGYHN--I-REDKLIK--LPKYSLFE---FEGGRRRLLAS ASELQKGNEMVLPGYLVELLYHA | 1248 |
| WP_045635197 | 1184 | NPI---TFLE---NKGYHN--V-RKENILC--LPKYSLFE---LENGRRRLLAS AKELQKGNEIVLPVYLTTLLYHS | 1246 |
| 5AXW_A | 913 | KPYrfdVYLD---NGVYKFvtV-KNLDVIK----KENYYE---VNSKAYEEAKK -KKISNQAEFIASFYNNDLIKIN | 978 |
| WP_009880683 | 861 | DPV---DFLE---AKGYKE--V-RKDLIIK--LPKYSLFE---LENGRKRMLAS -GELQKGNELALPSKYVNFLYLA | 923 |
| WP_010922251 | 1177 | NPI---DFLE---AKGYKE--V-KKDLIIK--LPKYSLFE---LENGRKRMLAS -GELQKGNELALPSKYVNFLYLA | 1239 |
| WP_011054416 | 1177 | DPI---DFLE---AKGYKE--V-RKDLIIK--LPKYSLFE---LENGRKRMLAS -GELQKGNELALPSKYVNFLYLA | 1239 |
| WP_011284745 | 1177 | NPI---DFLE---AKGYKE--V-RKDLIVK--LPKYSLFE---LENGRKRMLAS -GELQKGNELALPSKYVNFLYLA | 1239 |
| WP_011285506 | 1177 | NPI---DFLE---AKGYKE--V-KKDLIIK--LPKYSLFE---LENGRKRMLAS -GELQKGNELALPSKYVNFLYLA | 1239 |
| WP_011527619 | 1177 | NPI---DFLE---AKGYKE--V-RKDLIIK--LPKYSLFE---LENGRKRMLAS -GELQKGNELALPSKYVNFLYLA | 1239 |
| WP_012560673 | 1177 | DPV---DFLE---AKGYKE--V-RKDLIIK--LPKYSLFE---LENGRKRMLAS -GELQKGNELALPSKYVNFLYLA | 1239 |
| WP_014407541 | 1176 | NPI---DFLE---AKGYKE--V-KKDLIIK--LPKYSLFE---LENGRKRMLAS -GELQKGNELALPSKYVNFLYLA | 1238 |
| WP_020905136 | 1177 | NPI---DFLE---AKGYKE--V-KKDLIIK--LPKYSLFE---LENGRKRMLAS -GELQKGNELALPSKYVNFLYLA | 1239 |
| WP_023080005 | 1176 | NPI---DFLE---AKGYKE--V-RKDLIIK--LPKYSLFE---LENGRKRMLAS -GELQKGNELALPSKYVNFLYLA | 1238 |
| WP_023610282 | 1176 | NPI---DFLE---AKGYKE--V-RKDLIIK--LPKYSLFE---LENGRKRMLAS -GELQKGNELALPSKYVNFLYLA | 1238 |
| WP_030125963 | 1177 | NPI---DFLE---AKGYKE--V-RKDLIIK--LPKYSLFE---LENGRKRMLAS -GELQKGNELALPSKYVNFLYLA | 1239 |
| WP_030126706 | 1177 | NPI---DFLE---AKGYKE--V-RKDLIIK--LPKYSLFE---LENGRKRMLAS -GELQKGNELALPSKYVNFLYLA | 1239 |
| WP_031488318 | 1177 | NPI---DFLE---AKGYKE--V-RKDLIIK--LPKYSLFE---LENGRKRMLAS -GELQKGNELALPSKYVNFLYLA | 1239 |
| WP_032460140 | 1177 | DPV---DFLE---AKGYKE--V-RKDLIIK--LPKYSLFE---LENGRKRMLAS -GELQKGNELALPSKYVNFLYLA | 1239 |
| WP_032461047 | 1177 | DPV---DFLE---AKGYKE--V-RKDLIIK--LPKYSLFE---LENGRKRMLAS -GELQKGNELALPSKYVNFLYLA | 1239 |
| WP_032462016 | 1177 | NPI---DFLE---AKGYKE--V-KKDLIIK--LPKYSLFE---LENGRKRMLAS -GELQKGNELALPSKYVNFLYLA | 1239 |
| WP_032462936 | 1177 | NPI---DFLE---AKGYKE--V-RKDLIIK--LPKYSLFE---LENGRKRMLAS -GELQKGNELALPSKYVNFLYLA | 1239 |
| WP_032464890 | 1177 | NPI---DFLE---AKGYKE--V-RKDLIIK--LPKYSLFE---LENGRKRMLAS -GELQKGNELALPSKYVNFLYLA | 1239 |
| WP_033888930 | 1002 | NPI---DFLE---AKGYKE--V-KKDLIIK--LPKYSLFE---LENGRKRMLAS -GELQKGNELALPSKYVNFLYLA | 1064 |
| WP_038431314 | 1177 | NPI---DFLE---AKGYKE--V-RKDLIIK--LPKYSLFE---LENGRKRMLAS -GELQKGNELALPSKYVNFLYLA | 1239 |
| WP_038432938 | 1176 | NPI---DFLE---AKGYKE--V-RKDLIIK--LPKYSLFE---LENGRKRMLAS -GELQKGNELALPSKYVNFLYLA | 1238 |
| WP_038434062 | 1177 | NPI---DFLE---AKGYKE--V-RKDLIIK--LPKYSLFE---LENGRKRMLAS -GELQKGNELALPSKYVNFLYLA | 1239 |
| BAQ51233 | 1088 | NPI---DFLE---AKGYKE--V-KKDLIIK--LPKYSLFE---LENGRKRMLAS -GELQKGNELALPSKYVNFLYLA | 1150 |
| KGE60162 | 352 | DPI---DFLE---AKGYKE--V-RKDLIIK--LPKYSLFE---LENGRKRMLAS -GELQKGNELALPSKYVNFLYLA | 414 |
| KGE60856 | 115 | DPI---DFLE---AKGYKE--V-RKDLIIK--LPKYSLFE---LENGRKRMLAS -GELQKGNELALPSKYVNFLYLA | 177 |
| WP_002989955 | 1177 | NPI---DFLE---AKGYKE--V-RKDLIIK--LPKYSLFE---LENGRKRMLAS -GELQKGNELALPSKYVNFLYLA | 1239 |
| WP_003030002 | 1159 | HPV---DFLE---QRGYRN--V-RLEKIIK--LPKYSLFE---LENKRRRLLAS ARELQKGNELVIPQRFTTLLYHS | 1221 |
| WP_003065552 | 1187 | NPV---EFLE---NKGYHN--I-REDKLIK--LPKYSLFE---FEGGKRRLLAS ASELQKGNEMVIPGHLVKLLYHA | 1249 |
| WP_001040076 | 1178 | NPS---AFLE---SKGYLN--I-RTDKLII--LPKYSLFE---LENGRRRLLAS AGELQKGNELALPTQFMKFLYLA | 1240 |
| WP_001040078 | 1186 | NPS---AFLE---SKGYLN--I-RDDKLMI--LPKYSLFE---LENGRRRLLAS AGELQKGNELALPTQFMKFLYLA | 1248 |
| WP_001040080 | 1178 | NPS---AFLE---SKGYLN--I-RADKLII--LPKYSLFE---LENGRRRLLAS AGELQKGNELALPTQFMKFLYLA | 1240 |
| WP_001040081 | 1178 | NPS---AFLE---SKGYLN--I-RADKLII--LPKYSLFE---LENGRRRLLAS AGETIDRLQKGNELALPTQFMKFLYLA | 1240 |
| WP_001040083 | 1178 | NPS---AFLE---SKGYLN--I-RADKLII--LPKYSLFE---LENGRRRLLAS AGELQKGNELALPTQFMKFLYLA | 1240 |
| WP_001040085 | 1178 | NPS---AFLE---SKGYLN--I-RADKLII--LPKYSLFE---LENGRRRLLAS AGELQKGNELALPTQFMKFLYLA | 1240 |
| WP_001040087 | 1178 | NPS---AFLE---SKGYLN--I-RADKLII--LPKYSLFE---LENGRRRLLAS AGELQKGNELALPTQFMKFLYLA | 1240 |
| WP_001040088 | 1178 | NPS---AFLE---SKGYLN--I-RADKLII--LPKYSLFE---LENGRRRLLAS AGELQKGNELALPTQFMKFLYLA | 1240 |
| WP_001040089 | 1178 | NPS---AFLE---SKGYLN--I-RDDKLMI--LPKYSLFE---LENGRRRLLAS AGELQKGNELALPTQFMKFLYLA | 1240 |
| WP_001040090 | 1178 | NPS---AFLE---SKGYLN--I-RADKLII--LPKYSLFE---LENGRRRLLAS AGELQKGNELALPTQFMKFLYLA | 1240 |
| WP_001040091 | 1178 | NPS---AFLE---SKGYLN--I-RADKLII--LPKYSLFE---LENGRRRLLAS AGELQKGNELALPTQFMKFLYLA | 1240 |
| WP_001040092 | 1178 | NPS---AFLE---SKGYLN--I-RTDKLII--LPKYSLFE---LENGRRRLLAS AGELQKGNELALPTQYMKFLYLA | 1240 |
| WP_001040094 | 1178 | NPS---AFLE---SKGYLN--I-RDDKLMI--LPKYSLFE---LENGRRRLLAS AGELQKGNELALPTQFMKFLYLA | 1240 |
| WP_001040095 | 1178 | NPS---AFLE---SKGYLN--I-RTDKLII--LPKYSLFE---LENGRRRLLAS AGELQKGNELALPTQYMKFLYLA | 1240 |
| WP_001040096 | 1178 | NPS---AFLE---SKGYLN--I-RTDKLII--LPKYSLFE---LENGRRRLLAS AGELQKGNELALPTQYMKFLYLA | 1240 |
| WP_001040097 | 1178 | NPS---AFLE---SKGYLN--I-RDDKLMI--LPKYSLFE---LENGRRRLLAS ADELQKGNELALPTQFMKFLYLA | 1240 |
| WP_001040098 | 1178 | NPS---AFLE---SKGYLN--I-RDDKLMI--LPKYSLFE---LENGRRRLLAS AGELQKGNELALPTQFMKFLYLA | 1240 |
| WP_001040099 | 1178 | NPS---AFLE---SKGYLN--I-RDDKLMI--LPKYSLFE---LENGRRRLLAS AGELQKGNELALPTQFMKFLYLA | 1240 |
| WP_001040100 | 1178 | NPS---AFLE---SKGYLD--I-RDDKLMI--LPKYSLFE---LENGRRRLLAS AGELQKGNELALPTQFMKFLYLA | 1240 |
| WP_001040104 | 1178 | NPS---AFLE---SKGYLN--I-RADKLII--LPKYSLFE---LENGRRRLLAS AGELQKGNELALPTQFMKFLYLA | 1240 |
| WP_001040105 | 1178 | NPS---AFLE---SKGYLN--I-RADKLII--LPKYSLFE---LENGRRRLLAS AGELQKGNELALPTQFMKFLYLA | 1240 |
| WP_001040106 | 1178 | NPS---AFLE---SKGYLN--I-RDDKLMI--LPKYSLFE---LENGRRRLLAS AGELQKGNELALPTQYMKFLYLA | 1240 |
| WP_001040107 | 1178 | NPS---AFLE---SKGYLN--I-RDDKLMI--LPKYSLFE---LENGRRRLLAS AGELQKGNELALPTQYMKFLYLA | 1240 |
| WP_001040108 | 1178 | NPS---AFLE---SKGYLN--I-RDDKLMI--LPKYSLFE---LENGRRRLLAS AGELQKGNELALPTQYMKFLYLA | 1240 |
| WP_001040109 | 1178 | NPS---AFLE---SKGYLN--I-RDDKLMI--LPKYSLFE---LENGRRRLLAS AGELQKGNELALPTQYMKFLYLA | 1240 |
| WP_001040110 | 1178 | NPS---AFLE---SKGYLN--I-RDDKLMI--LPKYSLFE---LENGRRRLLAS AGELQKGNELALPTQYMKFLYLA | 1240 |
| WP_015058523 | 1178 | NPS---AFLE---SKGYLN--I-RTDKLII--LPKYSLFE---LENGRRRLLAS AGELQKGNELALPTQYMKFLYLA | 1240 |
| WP_017643650 | 1178 | NPS---AFLE---SKGYLN--I-RDDKLMI--LPKYSLFE---LENGRRRLLAS ADELQKGNELALPTQFMKFLYLA | 1240 |
| WP_017647151 | 1178 | NPS---AFLE---SKGYLN--I-RDDKLMI--LPKYSLFE---LENGRRRLLAS AGELQKGNELALPTQFMKFLYLA | 1240 |
| WP_017648376 | 1178 | NPS---AFLE---SKGYLN--I-RDDKLMI--LPKYSLFE---LENGRRRLLAS AGELQKGNELALPTQFMKFLYLA | 1240 |
| WP_017649527 | 1178 | NPS---AFLE---SKGYLN--I-RADKLII--LPKYSLFE---LENGRRRLLAS AGELQKGNELALPTQFMKFLYLA | 1240 |
| WP_017771611 | 1178 | NPS---AFLE---SKGYLN--I-RDDKLMI--LPKYSLFE---LENGRRRLLAS AGELQKGNELALPTQYMKFLYLA | 1240 |
| WP_017771984 | 1178 | NPS---AFLE---SKGYLN--I-RADKLII--LPKYSLFE---LENGRRRLLAS AGELQKGNELALPTQFMKFLYLA | 1240 |
| CFQ25032 | 1178 | NPS---AFLE---SKGYLN--I-RADKLII--LPKYSLFE---LENGRRRLLAS AGELQKGNELALPTQFMKFLYLA | 1240 |
| CFV16040 | 1178 | NPS---AFLE---SKGYLN--I-RADKLII--LPKYSLFE---LENGRRRLLAS AGELQKGNELALPTQFMKFLYLA | 1240 |
| KLJ37842 | 1178 | NPS---AFLE---SKGYLN--I-RADKLII--LPKYSLFE---LENGRRRLLAS AGELQKGNELALPTQFMKFLYLA | 1240 |
| KLJ72361 | 1178 | NPS---AFLE---SKGYLN--I-RADKLII--LPKYSLFE---LENGRRRLLAS AGELQKGNELALPTQFMKFLYLA | 1240 |
| KLL20707 | 1192 | NPS---AFLE---SKGYLN--I-RADKLII--LPKYSLFE---LENGRRRLLAS AGELQKGNELALPTQFMKFLYLA | 1254 |
| KLL42645 | 1178 | NPS---AFLE---SKGYLN--I-RDDKLMI--LPKYSLFE---LENGRRRLLAS AGELQKGNELALPTQYMKFLYLA | 1240 |
| WP_047207273 | 1178 | NPS---AFLE---SKGYLN--I-RADKLII--LPKYSLFE---LENGRRRLLAS AGELQKGNELALPTQFMKFLYLA | 1240 |
| WP_047209694 | 1178 | NPS---AFLE---SKGYLN--I-RDDKLMI--LPKYSLFE---LENGRRRLLAS AGELQKGNELALPTQFMKFLYLA | 1240 |
| WP_050198062 | 1178 | NPS---AFLE---SKGYLN--I-RADKLII--LPKYSLFE---LENGRRRLLAS AGELQKGNELALPTQFMKFLYLA | 1240 |
| WP_050201642 | 1178 | NPS---AFLE---SKGYLN--I-RADKLII--LPKYSLFE---LENGRRRLLAS AGELQKGNELALPTQFMKFLYLA | 1240 |
| WP_050204027 | 1178 | NPS---AFLE---SKGYLN--I-RDDKLMI--LPKYSLFE---LENGRRRLLAS AGELQKGNELALPTQYMKFLYLA | 1240 |
| WP_050881965 | 1178 | NLS---AFLE---SKGYLN--I-RADKLII--LPKYSLFE---LENGRRRLLAS AGELQKGNELALPTQFMKFLYLA | 1240 |
| WP_050886065 | 1178 | NPS---AFLE---SKGYLN--I-RADKLII--LPKYSLFE---LENGRRRLLAS AGELQKGNELALPTQFMKFLYLA | 1240 |
| AHN30376 | 1178 | NPS---AFLE---SKGYLN--I-RTDKLII--LPKYSLFE---LENGRRRLLAS AGELQKGNELALPTQYMKFLYLA | 1240 |
| EAO78426 | 1178 | NPS---AFLE---SKGYLN--I-RADKLII--LPKYSLFE---LENGRRRLLAS AGELQKGNELALPTQFMKFLYLA | 1240 |
| CCW42055 | 1178 | NPS---AFLE---SKGYLN--I-RTDKLII--LPKYSLFE---LENGRRRLLAS AGELQKGNELALPTQFMKFLYLA | 1240 |
| WP_003041502 | 1186 | DKR---AFLL---GKGYKD--I-K--KIIE--LPKYSLFE---LKDGSRRMLAS RGEIHKGNELFVPQKFTTLLYHA | 1253 |
| WP_037593752 | 1160 | NPV---DFLE---QRGYRN--V-RLEKIIK--LPKYSLFE---LENKRRRLLAS ARELQKGNELVIPQRFTTLLYHS | 1222 |
| WP_049516684 | 1160 | HPV---DFLE---QRGYRN--V-RLEKIIK--LPKYSLFE---LENKRRRLLAS ARELQKGNELVIPQRFTTLLYHS | 1222 |
| GAD46167 | 1159 | NPV---DFLE---QRGYRN--V-RLEKIIK--LPKYSLFE---LENKRRRLLAS ARELQKGNELVIPQRFTTLLYHS | 1221 |
| WP_018363470 | 1191 | NPV---EFLK---NKGYQN--V-QEDKLMK--LPKYSLFE---FEGGRRRLLAS ATELQKGNEIMLSAHLVALLYHA | 1253 |
| WP_003043819 | 1186 | DPI---GFLE---AKGYKD--I-KKELIFK--LPKYSLFE---LENGRRRMLAS --ELQKANELVLPQHLVRLLYYT | 1248 |
| WP_006269658 | 1159 | NPV---DFLE---QRGYRN--V-RLEKIIK--LPKYSLFE---LENKRRRLLAS AKELQKGNELVIPQRFTTLLYHS | 1221 |
| WP_048800889 | 1179 | NPI---MFLE---SKGYRN--I-QKDKLIK--LPKYSLFE---FEGGRRRLLAS AVELQKGNEMVLPQYLNNLLYHA | 1241 |
| WP_012767106 | 1178 | NPL---KFIE---DKGYGN--V-QIDKCIK--LPKYSLFE---FENGTRRMLAS RGDLQKANEMFLPAKLVTLLY-- | 1245 |
| WP_014612333 | 1178 | NPL---KFIE---DKGYGN--V-QIDKCIK--LPKYSLFE---FENGTRRMLAS RGDLQKANEMFLPAKLVTLLY-- | 1245 |
| WP_015017095 | 1178 | NPL---KFIE---DKGYGN--V-QIDKCIK--LPKYSLFE---FENGTRRMLAS RGDLQKANEMFLPAKLVTLLY-- | 1245 |
| WP_015057649 | 1178 | NPL---KFIE---DKGYGN--V-QIDKCIK--LPKYSLFE---FENGTRRMLAS RGDLQKANEMFLPAKLVTLLY-- | 1245 |
| WP_048327215 | 1178 | NPL---KFIE---DKGYGN--V-QIDKCIK--LPKYSLFE---FENGTRRMLAS RGDLQKANEMFLPAKLVTLLY-- | 1245 |
| WP_049519324 | 1178 | NPL---KFIE---DKGYGN--V-QIDKCIK--LPKYSLFE---FENGTRRMLAS RGDLQKANEMFLPAKLVTLLY-- | 1245 |
| WP_012515931 | 1157 | NPV---VFLE---ARGYRE--I-QEHLIIK--LPKYSLFE---LENGRRRLLAS -SELQKGNELFLPVDYMTFLYLA | 1219 |
| WP_021320964 | 1157 | NPV---VFLE---AKGYRE--I-QEHLIIK--LPKYSLFE---LENGRRRLLAS -SELQKGNELFLPVDYMTFLYLA | 1219 |
| WP_037581760 | 1157 | NPV---VFLE---AKGYRE--I-QEHLIIK--LPKYSLFE---LENGRRRLLAS -SELQKGNELFLPVDYMTFLYLA | 1219 |
| WP_004232481 | 1189 | NPV---SFLE---KKGYHN--V-QEDKLIK--LPKYSLFE---FEGGRRRLLAS ATELQKGNEVVLPQYMVNLLYHS | 1251 |
| WP_009854540 | 1184 | NPV---EFLE---NKGYHN--I-REDKLIK--LPKYSLFE---FEGGRRRLLAS ASELQKGNEMVLPGYLVELLYHA | 1246 |
| WP_012962174 | 1185 | NPV---VFLE---KKGYQN--V-QEDNLIK--LPKYSLFE---FEGGRRRLLAS ASELQKGNEVVLSRHLVELLYHA | 1247 |
| WP_039695303 | 1186 | NPV---EFLE---NKGYHN--I-REDKLIK--LPKYSLFE---FEGGRRRLLAS ASELQKGNEMVLPGYLVELLYHA | 1248 |
| WP_014334983 | 1189 | NPV---SFLE---KKGYHN--V-QEDKLIK--LPKYSLFE---FEGGRRRLLAS ATELQKGNEVMLPAHLVELLYHA | 1251 |
| WP_003099269 | 1177 | DPI---AFLE---KKGYQD--I-QTSSIIK--LPKYSLFE---LENGRKRLLAS --ELQKGNELALPNKYVKFLYLA | 1239 |
| AHY15608 | 1177 | DPI---AFLE---KKGYQD--I-QTSSIIK--LPKYSLFE---LENGRKRLLAS --ELQKGNELALPNKYVKFLYLA | 1239 |
| AHY17476 | 1177 | DPI---AFLE---KKGYQD--I-QTSSIIK--LPKYSLFE---LENGRKRLLAS --ELQKGNELALPNKYVKFLYLA | 1239 |
| ESR09100 | 9 | DPI---AFLE---KKGYQD--I-QTSSIIK--LPKYSLFE---LENGRKRLLAS -KELQKGNELALPNKYVKFLYLA | 71 |
| AGM98575 | 1177 | DPI---AFLE---KKGYQD--I-QTSSIIK--LPKYSLFE---LENGRKRLLAS --ELQKGNELALPNKYVKFLYLA | 1239 |
| ALF27331 | 1159 | NPV---AFLE---RKGYRN--V-QEENIVK--LPKYSLFE---LENGRRRLLAS ARELQKGNEIVLPNHLGTMLYHA | 1221 |
| WP_018372492 | 1168 | EPEr---FLA---QKGFER--V-EKT--IK--LPKYSLFE---MEKGRRRLLAS SGELQKGNQVLLPEHLIRLLSYA | 1228 |
| WP_045618028 | 1189 | NPI---AYLE---ECGYKN--I-NPNLIIK--LPKYSLFE---FNNGQRRLLAS SIELQKGNELIVPYHFTALLYHA | 1251 |
| WP_045635197 | 1184 | NPI---TFLE---NKGYHN--V-RKENILC--LPKYSLFE---LENGRRRLLAS AKELQKGNEIVLPVYLTTLLYHS | 1246 |
| WP_002263549 | 1159 | DPV---AFLE---RKGYRN--V-QEENIIK--LPKYSLFK---LENGRKRLLAS ARELQKGNEIVLPNHLGTLLYHA | 1221 |
| WP_002263887 | 1159 | DPV---AFLE---RKGYRN--V-QEENIIK--LPKYSLFK---LENGRKRLLAS ARELQKGNEIVLPNHLGTLLYHA | 1221 |
| WP_002264920 | 1159 | DPV---AFLE---RKGYRN--V-QEENIIK--LPKYSLFK---LENGRKRLLAS ARELQKGNEIVLPNHLGTLLYHA | 1221 |
| WP_002269043 | 1159 | DPV---AFLE---RKGYRN--V-QEENIIK--LPKYSLFK---LENGRKRLLAS ARELQKGNEIVLPNHLGTLLYHA | 1221 |
| WP_002269448 | 1159 | DPV---AFLE---RKGYRN--V-QEENIIK--LPKYSLFK---LENGRKRLLAS ARELQKGNEIVLPNHLGTLLYHA | 1221 |
| WP_002271977 | 1159 | DPV---AFLE---RKGYRN--V-QEENIIK--LPKYSLFK---LENGRKRLLAS ARELQKGNEIVLPNHLGTLLYHA | 1221 |
| WP_002272766 | 1159 | DPV---AFLE---RKGYRN--V-QEENIIK--LPKYSLFK---LENGRKRLLAS ARELQKGNEIVLPNHLGTLLYHA | 1221 |
| WP_002273241 | 1159 | DPV---AFLE---RKGYRN--V-QEENIIK--LPKYSLFK---LENGRKRLLAS ARELQKGNEIVLPNHLGTLLYHA | 1221 |
| WP_002275430 | 1159 | DPV---AFLE---RKGYRN--V-QEENIIK--LPKYSLFK---LENGRKRLLAS ARELQKGNEIVLPNHLGTLLYHA | 1221 |
| WP_002276448 | 1159 | DPV---AFLE---RKGYRN--V-QEENIIK--LPKYSLFK---LENGRKRLLAS ARELQKGNEIVLPNHLGTLLYHA | 1221 |
| WP_002277050 | 1167 | NPV---KFLK---DKGYQQ--I-EKNNFVK--LPKYTLVD---IGNGIKRLWAS SKEVHKGNOLVVSKKSQDLLYHA | 1229 |
| WP_002277364 | 1159 | DPV---AFLE---RKGYRN--V-QEENIIK--LPKYSLFK---LENGRKRLLAS ARELQKGNEIVLPNHLGTLLYHA | 1221 |
| WP_002279025 | 1159 | DPV---AFLE---RKGYRN--V-QEENIIK--LPKYSLFK---LENGRKRLLAS ARELQKGNEIVLPNHLGTLLYHA | 1221 |
| WP_002279859 | 1159 | DPV---AFLE---RKGYRN--V-QEENIIK--LPKYSLFK---LENGRKRLLAS ARELQKGNEIVLPNHLGTLLYHA | 1221 |
| WP_002280230 | 1159 | DPV---AFLE---RKGYRN--V-QEENIIK--LPKYSLFK---LENGRKRLLAS ARELQKGNEIVLPNHLGTLLYHA | 1221 |
| WP_002281696 | 1159 | DPV---AFLE---RKGYRN--V-QEENIIK--LPKYSLFK---LENGRKRLLAS ARELQKGNEIVLPNHLGTLLYHA | 1221 |
| WP_002282247 | 1167 | NPV---KFLK---DKGYQQ--I-EKNNFVK--LPKYTLVD---IGNGIKRLWAS SKEVHKGNQLVVSKKSQDLLYHA | 1229 |
| WP_002282906 | 1159 | DPV---AFLE---RKGYRN--V-QEENIIK--LPKYSLFK---LENGRKRLLAS ARELQKGNEIVLPNHLGTLLYHA | 1221 |
| WP_002283846 | 1159 | DPV---AFLE---RKGYRN--V-QEENIIK--LPKYSLFK---LENGRKRLLAS ARELQKGNEIVLPNHLGTLLYHA | 1221 |
| WP_002287255 | 1159 | DPV---AFLE---RKGYRN--V-QEENIIK--LPKYSLFK---LENGRKRLLAS ARELQKGNEIVLPNHLGTLLYHA | 1221 |
| WP_002288990 | 1159 | DPV---AFLE---RKGYRN--V-QEENIIK--LPKYSLFK---LENGRKRLLAS ARELQKGNEIVLPNHLGTLLYHA | 1221 |
| WP_002289641 | 1159 | DPV---AFLE---RKGYRN--V-QEENIIK--LPKYSLFK---LENGRKRLLAS ARELQKGNEIVLPNHLGTLLYHA | 1221 |
| WP_002290427 | 1159 | DPV---AFLE---RKGYRN--V-QEENIIK--LPKYSLFK---LENGRKRLLAS ARELQKGNEIVLPNHLGTLLYHA | 1221 |
| WP_002295753 | 1159 | DPI---AFLE---RKGYRN--V-QEENIIK--LPKYSLFK---LENGRKRLLAS ARELQKGNEIVLPNHLGTLLYHA | 1221 |
| WP_002296423 | 1159 | DPV---AFLE---RKGYRN--V-QEENIIK--LPKYSLFK---LENGRKRLLAS ARELQKGNEIVLPNHLGTLLYHA | 1221 |
| WP_002304487 | 1173 | DPV---AFLE---RKGYRN--V-QEENIIK--LPKYSLFK---LENGRKRLLAS ARELQKGNEIVLPNHLETLLYHA | 1235 |
| WP_002305844 | 1159 | DPV---AFLE---RKGYRN--V-QEENIIK--LPKYSLFK---LENGRKRLLAS ARELQKGNEIVLPNHLGTLLYHA | 1221 |
| WP_002307203 | 1159 | DPI---AFLE---RKGYRN--V-QEENIIK--LPKYSLFK---LENGRKRLLAS ARELQKGNEIVLPNHLGTLLYHA | 1221 |
| WP_002310390 | 1159 | DPV---AFLE---RKGYRN--V-QEENIIK--LPKYSLFK---LENGRKRLLAS ARELQKGNEIVLPNHLGTLLYHA | 1221 |
| WP_002352408 | 1159 | DPV---AFLE---RKGYRN--V-QEENIIK--LPKYSLFK---LENGRKRLLAS ARELQKGNEIVLPDHLGTLLYHA | 1221 |
| WP_012997688 | 1159 | DPV---AFLE---RKGYRN--V-QEENIIK--LPKYSLFK---LENGRKRLLAS ARELQKGNEIVLPNHLGTLLYHA | 1221 |
| WP_014677909 | 1159 | DPV---AFLE---RKGYRN--V-QEENIIK--LPKYSLFK---LENGRKRLLAS ARELQKGNEIVLPNHLGTLLYHA | 1221 |
| WP_019312892 | 1159 | DPV---AFLE---RKGYRN--V-QEENIIK--LPKYSLFK---LENGRKRLLAS ARELQKGNEIVLPNHLGTLLYHA | 1221 |
| WP_019313659 | 1159 | DPV---AFLE---RKGYRN--V-QEENIIK--LPKYSLFK---LENGRKRLLAS ARELQKGNEIVLPNHLGTLLYHA | 1221 |
| WP_019314093 | 1159 | DPI---AFLE---RKGYRN--V-QEENIIK--LPKYSLFK---LENGRKRLLAS ARELQKGNEIVLPNHLGTLLYHA | 1221 |
| WP_019315370 | 1159 | DPV---AFLE---RKGYRN--V-QEENIIK--LPKYSLFK---LENGRKRLLAS ARELQKGNEIVLPNHLGTLLYHA | 1221 |
| WP_019803776 | 1159 | DPV---AFLE---RKGYRN--V-QEENIIK--LPKYSLFK---LENGRKRLLAS ARELQKGNEIVLPNHLGTLLYHA | 1221 |
| WP_019805234 | 1159 | DPV---AFLE---RKGYRN--V-QEENIIK--LPKYSLFK---LENGRKRLLAS ARELQKGNEIVLPNHLGTLLYHA | 1221 |
| WP_024783594 | 1159 | DPV---AFLE---RKGYRN--V-QEENIIK--LPKYSLFK---LENGRKRLLAS ARELQKGNEIVLPNHLGTLLYHA | 1221 |
| WP_024784288 | 1167 | NPV---KFLK---DKGYQQ--I-EKNNFVK--LPKYTLVD---IGNGIKRLWAS SKEVHKGNQLVVSKKSQDLLYHA | 1229 |
| WP_024784666 | 1159 | DPV---AFLE---RKGYRN--V-QEENIIK--LPKYSLFK---LENGRKRLLAS ARELQKGNEIVLPNHLGTLLYHA | 1221 |
| WP_024784894 | 1159 | DPV---AFLE---RKGYRN--V-QEENIIK--LPKYSLFK---LENGRKRLLAS ARELQKGNEIVLPNHLGTLLYHA | 1221 |
| WP_024786433 | 1167 | NPV---KFLK---DKGYQQ--I-EKNNFVK--LPKYTLVD---IGNGIKRLWAS SKEVHKGNQLVVSKKSQDLLYHA | 1229 |
| WP_049473442 | 1159 | DPV---AFLE---RKGYRN--V-QEENIIK--LPKYSLFK---LENGRKRLLAS ARELQKGNEIVLPNHLGTLLYHA | 1221 |
| WP_049474547 | 1159 | DPV---AFLE---RKGYRN--V-QEENIIK--LPKYSLFK---LENGRKRLLAS ARELQKGNEIVLPNHLGTLLYHA | 1221 |
| EMC03581 | 1152 | DPV---AFLE---RKGYRN--V-QEENIIK--LPKYSLFK---LENGRKRLLAS ARELQKGNEIVLPNHLGTLLYHA | 1214 |
| WP_000428612 | 1187 | SPI---AFLE---NKGYHN--V-RKENILC--LPKYSLFE---LKNGRRRMLAS AKELQKGNEIVLPVHLTTLLYHA | 1249 |
| WP_000428613 | 1185 | NPI---TFLE---NKGYHN--V-RKENILC--LPKYSLFE---LENGRRRLLAS AKELQKGNEIVLPVYLTTLLYHS | 1247 |
| WP_049523028 | 1180 | NPV---AFLE---GKGYQN--V-VEENIIR--LPKYSLFE---LENGRRRMLAS AKELQKGNEMVLPSYLIALLYHA | 1242 |
| WP_003107102 | 1146 | DRI---TFLE---KKGYQD--I-QESLIIK--LPKFSLFE---LENGRKRLLAS --ELQKGNELSLPNKYIQFLYLA | 1208 |
| WP_054279288 | 1179 | NPI---AFLE---SKGYHD--I-QEHLMIT--LPKYSLFE---LENGRRRLLAS --ELQKGNEMVLPQHLVTFLYRV | 1241 |
| WP_049531101 | 1189 | NPT---AYLE---EYGYKN--I-NPNLIIK--LPKYSLFK---ENDGORRLLAS SIELQKGNELILPYHFTTLLYHA | 1251 |
| WP_049538452 | 1189 | NPI---AYLE---ECGYKN--I-NPNLIIK--LPKYSLFE---FNGGORRLLAS SIELQKGNELILPYHFTALLYHT | 1251 |
| WP_049549711 | 1191 | NPI---AYLE---ECGYKN--I-NPNLIIK--LPKYSLFE---FNGGQRRLLAS SIELQKGNELILPYHFTALLYHA | 1253 |
| WP_007896501 | 1183 | DNI---AFLE---KKGYQD--I-QEKLLIK--LPKYSLFE---LENGRRRLLAS --EFQKGNELALSGKYMKFLYLA | 1245 |
| EFR44625 | 1135 | DNI---AFLE---KKGYQD--I-QEKLLIK--LPKYSLFE---LENGRRRLLAS --EFQKGNELALSGKYMKFLYLA | 1197 |
| WP_002897477 | 1184 | NPI---TFLE---NKGYHN--V-RKENILC--LPKYSLFE---LENGRRRLLAS AKELQKGNEIVLPVCLTTLLYHS | 1246 |
| WP_002906454 | 1190 | NPV---TYLE---ECGYKN--I-NSNLIIK--LPKYSLFE---ENDGORRLLAS SIELQKGNELILPYHLTALLYHA | 1252 |
| WP_009729476 | 1185 | NPI---AFLE---NKGYHN--V-CKENILC--LPKYSLFE---LENGRRRLLAS AKELQKCNEIVLPVYLITLLYHS | 1247 |
| COR24647 | 1175 | NSV---TFLE---EKGYRN--I-RENTIIK--FPKYSLFE---LENGRRRLLAS AIELQKGNEMFLPQQFVNLLYHA | 1237 |
| WP_000066813 | 1189 | NPI---TFLE---NKGYHN--V-RKENILC--LPKYSLFE---LESGRRRMLAS AKELQKGNEIVLPVYLTTLLYHS | 1251 |
| WP_009754323 | 1185 | NPI---TFLE---NKGYHN--V-RKENILC--LPKYSLFE---LENGRRRLLAS AKELQKGNEIVLPVYLTTLLYHS | 1247 |
| WP_044674937 | 1178 | NPI---EFLE---HKGYKN--I-LEKNIIK--LPKYSLFE---LENGRRRLLAS AKELQKGNEMILPPHLVTLLYHS | 1240 |
| WP_044676715 | 1180 | NPI---EFLE---HKGYKN--I-LEKNIIK--LPKYSLFE---LENGRRRLLAS AKELQKGNEMILPPHLVTLLYHS | 1242 |
| WP_044680361 | 1180 | NPI---EFLE---HKGYKN--I-LEKNIIK--LPKYSLFE---LENGRRRLLAS AKELQKGNEMILPPHLVTLLYHS | 1242 |
| WP_044681799 | 1178 | NPI---EFLE---HKGYKN--I-LEKNIIK--LPKYSLFE---LENGRRRLLAS AKELQKGNEMILPPHLVTLLYHS | 1240 |
| WP_049533112 | 1186 | DKR---AFLL---GKGYKD--I-K--KIIE--LPKYSLFE---LKDGSRRMLAS RGEIHKGNELFVPQKFTTLLYHA | 1253 |
| WP_029090905 | 1118 | SETslqAYIA---EQIKSE--VeILN----grILKYQLIS----NNGNRLYIAG -SERHNARQLIVSDEAAKVIWLI | 1181 |
| WP_006506696 | 1150 | EKI---NYIE--eKEGLSD--VrIIK---Dn-IPVNOMIEm----DGGEYLLTS --EYVNARQLVLNEKQCALIADI | 1211 |
| AIT42264 | 1177 | NPI---DFLE---AKGYKE--V-KKDLIIK--LPKYSLFE---LENGRKRMLAS -GELQKGNELALPSKYVNFLYLA | 1239 |
| WP_034440723 | 1150 | QTT---EYLG---KIGFNK--ASIIN---S--FKNYTLFE---LENGSRRMIVG KGELQKGNQMYLPQNLLEFVYHL | 1217 |
| AKQ21048 | 1177 | NPI---DFLE---AKGYKE--V-KKDLIIK--LPKYSLFE---LENGRKRMLAS -GELQKGNELALPSKYVNFLYLA | 1239 |
| WP_004636532 | 1151 | HPT---AYLE---EAGYNN--P-TV--LHE--LFKYQLFE---LEDGSRRMIAS AKEFQKGNQMVLPLELVELLYHA | 1211 |
| WP_002364836 | 1157 | NPI---LFLE---EKGFLR--P-RV--LMK--LPKYTLYE---FPEGRRRLLAS AKEAQKGNQMVLPEHLLTLLYHA | 1217 |
| WP_016631044 | 1108 | NPI---LFLE---EKGFLR--P-RV--LMK--LPKYTLYE---FPEGRRRLLAS AKEAQKGNQMVLPEHLLTLLYHA | 1168 |
| EMS75795 | 893 | DPI---GFLS---NKGYSN--V-TKF--IK--LSKYTLYE---LENGRRRMVAS -KEAQKANSFILPEKLVTLLYHA | 953 |
| WP_002373311 | 1157 | NPI---LFLE---EKGFLR--P-RV--LMK--LPKYTLYE---FPEGRRRLLAS AKEAQKGNQMVLPEHLLTLLYHA | 1217 |
| WP_002378009 | 1157 | NPI---LFLE---EKGFLR--P-RV--LMK--LPKYTLYQ---FPEGRRRLLAS AKEAQKGNQMVLPEHLLTLLYHA | 1217 |
| WP_002407324 | 1157 | NPI---LFLE---EKGFLR--P-RV--LMK--LPKYTLYE---FPEGRRRLLAS AKEAQKGNQMVLPEHLLTLLYHA | 1217 |
| WP_002413717 | 1157 | NPI---LFLE---EKGFLR--P-RV--LMK--LPKYTLYE---FPEGRRRLLAS AKEAQKGNQMVLPEHLLTLLYHA | 1217 |
| WP_010775580 | 1159 | NPI---LFLE---EKGFLR--P-RV--LMK--LPKYTLYE---FPEGRRRLLAS AKEAQKGNQMVLPEHLLILLYHA | 1219 |
| WP_010818269 | 1157 | NPI---LFLE---EKGFLR--P-RV--LMK--LPKYTLYE---FPEGRRRLLAS AKEAQKGNQMVLPEHLLTLLYHA | 1217 |
| WP_010824395 | 1157 | NPI---LFLE---EKGFLR--P-RV--LMK--LPKYTLYE---FPEGRRRLLAS AKEAQKGNOMVLPEHLLTLLYHA | 1217 |
| WP_016622645 | 1157 | NPI---LFLE---EKGFLR--P-RV--LMK--LPKYTLYE---FPEGRRRLLAS AKEAQKGNQMVLPEHLLTLLYHA | 1217 |
| WP_033624816 | 1157 | NPI---LFLE---EKGFLR--P-RV--LMK--LPKYTLYE---FPEGRRRLLAS AKEAQKGNQMVLPERLLTLLYHA | 1217 |
| WP_033625576 | 1157 | NPI---LFLE---EKGFLR--P-RV--LMK--LPKYTLYE---FPEGRRRLLAS AKEAQKGNQMVLPEHLLTLLYHA | 1217 |
| WP_033789179 | 1157 | NPI---LFLE---EKGFLR--P-RV--LMK--LPKYTLYE---FPEGRRRLLAS AKEAQKGNQMVLPEHLLTLLYHA | 1217 |
| WP_002310644 | 1159 | SPV---LFLK---NKGYEQ--A-EIE--MK--LPKYALFE---LENGRKRMVAS -KEAQKANSFLLPEHLVTLLYHA | 1219 |
| WP_002312694 | 1160 | SPV---LFLK---NKGYEQ--A-EIE--MK--LPKYALFE---LENGRKRMVAS -KEAQKANSFLLPEHLVTLLYHA | 1220 |
| WP_002314015 | 1160 | SPV---LFLK---NKGYEQ--A-EIE--MK--LPKYALFE---LENGRKRMVAS -KEAQKANSELLPEHLVTLLYHA | 1220 |
| WP_002320716 | 1160 | SPV---LFLK---NKGYEQ--A-EIE--MK--LPKYALFE---LENGRKRMVAS -KEAQKANSELLPEHLVTLLYHA | 1220 |
| WP_002330729 | 1159 | SPV---LFLK---NKGYEQ--A-EIE--MK--LPKYALFE---LENGRKRMVAS -KEAQKANSELLPEHLVTLLYHA | 1219 |
| WP_002335161 | 1160 | SPV---LFLK---NKGYEQ--A-EIE--MK--LPKYALFE---LENGRKRMVAS -KEAQKANSFLLPEHLVTLLYHA | 1220 |
| WP_002345439 | 1160 | SPV---LFLK---NKGYEQ--A-EIE--MK--LPKYALFE---LENGRKRMVAS -KEAQKANSFLLPEHLVILLYHA | 1220 |
| WP_034867970 | 1150 | DPT---TFLK---EKGFPQ--V-TEF--IK--LPKYTLFE---FDNGRRRFLAS -KESQKGNPFILSDQLVTLLYHA | 1210 |
| WP_047937432 | 1160 | SPV---LFLK---NKGYEQ--A-EIE--MK--LPKYALFE---LENGRKRMVAS -KEAQKANSFLLPEHLVTLLYHA | 1220 |
| WP_010720994 | 1150 | DPT---TFLK---DKGFPQ--V-TEF--IK--LPKYTLFE---FDNGRRRFLAS -KESQKGNPFILSDQLVTLLYHA | 1210 |
| WP_010737004 | 1150 | DPT---TFLK---EKGFPQ--V-TEF--IK--LPKYTLFE---FDNGRRRFLAS -KESQKGNPFILSDQLVTLLYHA | 1210 |
| WP_034700478 | 1150 | DPT---TFLK---DKGFPH--V-TEF--IK--LPKYTLFE---FDNGRRRFLAS -KESQKGNPFILSDQLVTLLYHA | 1210 |
| WP_007209003 | 1148 | NPIl---YLS---KKDYHN---pKVEAI----LPKYSLFE---FENGRRRMVAS -SETQKGNOLIIPGHLMELLYHS | 1208 |
| WP_023519017 | 1144 | DPR---EFLK---TKGYEG--V-KQW--LI--LPKYILFE---AQGGYRRMIAS -QETQKANSLILPENLVTLLYHA | 1204 |
| WP_010770040 | 1155 | DPV---SLLE---EKGYAN--P-EV--LIH--LPKYTLYE---LENGRRRLLAS ANEAQKGNQLVLPASLVTLLYHA | 1215 |
| WP_048604708 | 1152 | NER---EFLK---NKGYQN--P-QI--CMK--LPKYSLYE---FDDGRRRLLAS AKEAQKGNQMVLPAHLVTFLYHA | 1212 |
| WP_010750235 | 1153 | DPI---SFLI---EKGYSN--V-NQF--IK--LPKYTLFE---LANGORRMLAS -QELQKANSFILPEKLVTLLYHA | 1213 |
| AII16583 | 1216 | NPI---DFLE---AKGYKE--V-KKDLIIK--LPKYSLFE---LENGRKRMLAS -GELQKGNELALPSKYVNFLYLA | 1278 |
| WP_029073316 | 1165 | TKI---NYIK--eSEGLEE--VKIIK---E--ILKNQLIEi----NGGLFYVTS --EIVNARQLILDENCTRIIDGI | 1225 |
| WP_031589969 | 1165 | IKI---NYLK--qAEDLEE--VqIGK---E--ILKNQLIEk----DGGLYYIVA --EIINAKQLILNESQTKLVCEI | 1225 |
| KDA45870 | 1139 | DPT---AYLA---SRGYTNvtNsFIL-------PKYSLLEd---PEGRRRYLAS -KEFQKANELILPQHLVELLYWV | 1199 |
| WP_039099354 | 1171 | QKI-spQFTKv---KKQKGtiV-KVVEDFEv-IAPHILINqrfFDNGQELTLGS ----HNEQELILDKTAVKLLNGA | 1241 |
| AKP02966 | 1173 | KTL--qNWLE---ENVKHKksIqIIK---Nn-VPIGQIIY------SKKVGLLS -REIANRQQLILPPEHSALLRIL | 1237 |
| WP_010991369 | 1155 | DEK---AFLE---EQGYRQ--P-KV--LAK--LPKYTLYE---CEEGRRRMLAS ANEAQKGNQQVLPNHLVTLLHHA | 1215 |
| WP_033838504 | 1155 | DEK---AFLE---EQGYRQ--P-KV--LAK--LPKYTLYE---CEEGRRRMLAS ANEAQKGNQQVLPNHLVTLLHHV | 1215 |
| EHN60060 | 1158 | DEK---AFLE---EQGYRQ--P-KV--LAK--LPKYTLYE---CEEGRRRMLAS ANEAQKGNQQVLPNHLVTLLHHV | 1218 |
| EFR89594 | 924 | DEK---AFLE---EQGYRQ--P-KV--LAK--LPKYTLYE---CEEGRRRMLAS ANEAQKGNQQVLPNHLVTLLHHA | 984 |
| WP_038409211 | 1155 | DQK---AFLE---EKGYYS--P-KV--LTK--IPKYTLYE---CENGRRRMLGS ANEAQKGNQMVLPNHLMILLYHA | 1215 |
| EFR95520 | 774 | DQK---AFLE---EKGYYS--P-KV--LTK--IPKYTLYE---CENGRRRMLGS ANEAQKGNQMVLPNHLMTLLYHA | 834 |
| WP_003723650 | 1155 | DEE---AFLE---EKGYRH--P-KV--LTK--LPKYTLYE---CEKGRRRMLAS ANEAQKGNQLVLSNHLVSLLYHA | 1215 |
| WP_003727705 | 1155 | DEE---AFLE---EKGYHQ--P-KV--LTK--LPKYTLYE---CEKGRRRMLSS ANEAQKGNQLVLSNHLVSLLYHA | 1215 |
| WP_003730785 | 1155 | DEE---AFLE---EKGYHQ--P-KV--LTK--LPKYTLYE---CEKGRRRMLSS ANEAQKGNQLVLSNHLVSLLYHA | 1215 |
| WP_003733029 | 1155 | DEK---TFLE---EKGYHQ--P-KV--LIK--VPKYTLYE---CKNGRRRMLGS ANEAHKGNQMLLPNHLMALLYHA | 1215 |
| WP_003739838 | 1155 | DEK---SFLE---KQGYRQ--P-KV--LTK--LPKYTLYE---CENGRRRMLAS ANEAQKGNQQVLKGOLITLLHHA | 1215 |
| WP_014601172 | 1155 | DEE---AFLE---EKGYRH--P-KV--LTK--LPKYTLYE---CEKGRRRMLAS ANEAQKGNQLVLSNHLVSLLYHA | 1215 |
| WP_023548323 | 1155 | DEK---VFLE---GKGYHQ--P-KV--LTK--LPKYALYE---CENGRRRMLGS ANEVHKGNQMLLPNHLMTLLYHA | 1215 |
| WP_031665337 | 1155 | DEE---AFLE---EKGYRH--P-KV--LTK--LPKYTLYE---CEKGRRRMLAS ANEAQKGNQLVLSNHLVSLLYHA | 1215 |
| WP_031669209 | 1155 | DEK---TFLE---EKGYHQ--P-KV--LIK--VPKYTLYE---CENGRRRMLGS ANEAHKGNQMLLPNHLMALLYHA | 1215 |
| WP_033920898 | 1155 | DEK---VFLE---GKGYHQ--P-KV--LTK--LPKYALYE---CENGRRRMLGS ANEVHKGNQMLLPNHLMTLLYHA | 1215 |
| AKI42028 | 1158 | DEE---AFLE---EKGYRH--P-KV--LTK--LPKYTLYE---CEKGRRRMLAS ANEAQKGNQLVLSNHLVSLLYHA | 1218 |
| AKI50529 | 1158 | DEK---VFLE---GKGYHQ--P-KV--LTK--LPKYALYE---CENGRRRMLGS ANEVHKGNQMLLPNHLMTLLYHA | 1218 |
| EFR83390 | 603 | DEE---AFLE---EKGYRH--P-KV--LTK--LPKYTLYE---CEKGRRRMLAS ANEAQKGNQLVLSNHLVSLLYHA | 663 |
| WP_046323366 | 1155 | DOK---EFLE---GKGYRN--P-KV--ITK--IPKYTLYE---CENGRRRMLGS ANEAQKGNQMVLPNHLMTLLYHA | 1215 |
| AKE81011 | 1193 | NPI---DFLE---AKGYKE--V-KKDLIIK--LPKYSLFE---LENGRKRMLAS -GELQKGNELALPSKYVNFLYLA | 1255 |
| CUO82355 | 1154 | EQI---EYVE--kEEKLSD--VKIIK---Nn-IPLNQLIEi----DGRQYLLTS --ECVNAMQLVLNEEQCKLIADI | 1215 |
| WP_033162887 | 1155 | EQL---SYIAspeHEDLID--VrIVK---E--ILKNQLIEi----DGGLYYVTS --EYVTARQLSLNEQSCKLISEI | 1217 |
| AGZ01981 | 1210 | NPI---DFLE---AKGYKE--V-KKDLIIK--LPKYSLFE---LENGRKRMLAS -GELQKGNELALPSKYVNFLYLA | 1272 |
| AKA60242 | 1177 | NPI---DFLE---AKGYKE--V-KKDLIIK--LPKYSLFE---LENGRKRMLAS -GELQKGNELALPSKYVNFLYLA | 1239 |
| AKS40380 | 1177 | NPI---DFLE---AKGYKE--V-KKDLIIK--LPKYSLFE---LENGRKRMLAS -GELQKGNELALPSKYVNFLYLA | 1239 |
| 4UN5_B | 1181 | NPI---DFLE---AKGYKE--V-KKDLIIK--LPKYSLFE---LENGRKRMLAS -GELQKGNELALPSKYVNFLYLA | 1243 |
| WP_010922251 | 1240 | SHYEKLKgSPEDnEQKOL--FVEQHKHYLDEIIEQISEFSKRVILAD--ANLDKVL-S AYN-KH---RDKPIREq- | 1305 |
| WP_039695303 | 1249 | HRAD----NFNS-TEYLN--YVSEHKKEFEKVLSCVEDFANLYVDVE--KNLSKIR-A VAD-SM---DNFSIEE-- | 1308 |
| WP_045635197 | 1247 | KNVH----KLDE-PGHLE--YIQKHRNEFKDLLNLVSEFSQKYVLAD--ANLEKIK-S LYA-DN---EQADIEI-- | 1306 |
| 5AXW_A | 979 | GELYRVIgVNND1LNRIE---VNMIDITYREYLENMNDKRPPRIIKTiaSKTQSIK-K LYEvKSk--KHPQIIKkg | 1056 |
| WP_009880683 | 924 | SHYEKLKgSPEDnEQKOL--FVEQHKHYLDEIIEQISEFSKRVILAD--ANLDKVL-S AYN-KH---RDKPIREq- | 989 |
| WP_010922251 | 1240 | SHYEKLKgSPEDnEQKOL--FVEQHKHYLDEIIEQISEFSKRVILAD--ANLDKVL-S AYN-KH---RDKPIREq- | 1305 |
| WP_011054416 | 1240 | SHYEKLKgSPEDnEQKOL--FVEQHKHYLDEIIEQISEFSKRVILAD--ANLDKVL-S AYN-KH---RDKPIREq- | 1305 |
| WP_011284745 | 1240 | SHYEKLKgSPEDnEQKOL--FVEQHKHYLDEIIEQISEFSKRVILAD--ANLDKVL-S AYN-KH---RDKPIREq- | 1305 |
| WP_011285506 | 1240 | SHYEKLKgSPEDnEQKOL--FVEQHKHYLDEIIEQISEFSKRVILAD--ANLDKVL-S AYN-KH---RDKPIREq- | 1305 |
| WP_011527619 | 1240 | SHYEKLKgSPEDNEQKOL--FVEQHKHYLDEIIEQISEFSKRVILAD--ANLDKVL-S AYN-KH---RDKPIREq- | 1305 |
| WP_012560673 | 1240 | SHYEKLKgSPEDnEQKOL--FVEQHKHYLDEIIEQISEFSKRVILAD--ANLDKVL-S AYN-KH---RDKPIREq- | 1305 |
| WP_014407541 | 1239 | SHYEKLKgSPEDNEQKOL--FVEQHKHYLDEIIEQISEFSKRVILAD--ANLDKVL-S AYN-KH---RDKPIREq- | 1304 |
| WP_020905136 | 1240 | SHYEKLKgSPEDnEQKOL--FVEQHKHYLDEIIEQISEFSKRVILAD--ANLDKVL-S AYN-KH---RDKPIREq- | 1305 |
| WP_023080005 | 1239 | SHYEKLKgSPEDnEQKOL--FVEQHKHYLDEIIEQISEFSKRVILAD--ANLDKVL-S AYN-KH---RDKPIREq- | 1304 |
| WP_023610282 | 1239 | SHYEKLKgSPEDnEQKOL--FVEQHKHYLDEIIEQISEFSKRVILAD--ANLDKVL-S AYN-KH---RDKPIREq- | 1304 |
| WP_030125963 | 1240 | SHYEKLKgSPEDnEQKOL--FVEQHKHYLDEIIEQISEFSKRVILAD--ANLDKVL-S AYN-KH---RDKPIREq- | 1305 |
| WP_030126706 | 1240 | SHYEKLKgSPEDnEQKOL--FVEQHKHYLDEIIEQISEFSKRVILAD--ANLDKVL-S AYN-KH---RDKPIREq- | 1305 |
| WP_031488318 | 1240 | SHYEKLKgSPEDnEQKQL--FVEQHKHYLDEIIEQISEFSKRVILAD--ANLDKVL-S AYN-KH---RDKPIREq- | 1305 |
| WP_032460140 | 1240 | SHYEKLKgSPEDnEQKOL--FVEQHKHYLDEIIEQISEFSKRVILAD--ANLDKVL-S AYN-KH---RDKPIREq- | 1305 |
| WP_032461047 | 1240 | SHYEKLKgSPEDnEQKOL--FVEQHKHYLDEIIEQISEFSKRVILAD--ANLDKVL-S AYN-KH---RDKPIREq- | 1305 |
| WP_032462016 | 1240 | SHYEKLKgSPEDnEQKOL--FVEQHKHYLDEIIEQISEFSKRVILAD--ANLDKVL-S AYN-KH---RDKPIREq- | 1305 |
| WP_032462936 | 1240 | SHYEKLKgSPEDnEQKOL--FVEQHKHYLDEIIEQISEFSKRVILAD--ANLDKVL-S AYN-KH---RDKPIREq- | 1305 |
| WP_032464890 | 1240 | SHYEKLKgSPEDnEQKOL--FVEQHKHYLDEIIEQISEFSKRVILAD--ANLDKVL-S AYN-KH---RDKPIREq- | 1305 |
| WP_033888930 | 1065 | SHYEKLKgSPEDnEQKOL--FVEQHKHYLDEIIEQISEFSKRVILAD--ANLDKVL-S AYN-KH---RDKPIREq- | 1130 |
| WP_038431314 | 1240 | SHYEKLKgSPEDnEQKOL--FVEQHKHYLDEIIEQISEFSKRVILAD--ANLDKVL-S AYN-KH---RDKPIREq- | 1305 |
| WP_038432938 | 1239 | SHYEKLKgSPEDnEQKOL--FVEQHKHYLDEIIEQISEFSKRVILAD--ANLDKVL-S AYN-KH---RDKPIREq- | 1304 |
| WP_038434062 | 1240 | SHYEKLKgSPEDNEQKQL--FVEQHKHYLDEIIEQISEFSKRVILAD--ANLDKVL-S AYN-KH---RDKPIREq- | 1305 |
| BAQ51233 | 1151 | SHYEKLKgSPEDnEQKOL--FVEQHKHYLDEIIEQISEFSKRVILAD--ANLDKVL-S AYN-KH---RDKPIREq- | 1216 |
| KGE60162 | 415 | SHYEKLKgSPEDnEQKOL--FVEQHKHYLDEIIEQISEFSKRVILAD--ANLDKVL-S AYN-KH---RDKPIREq- | 480 |
| KGE60856 | 178 | SHYEKLKgSPEDnEQKOL--FVEQHKHYLDEIIEQISEFSKRVILAD--ANLDKVL-S AYN-KH---RDKPIREq- | 243 |
| WP_002989955 | 1240 | SHYEKLKgSPEDNEQKOL--FVEQHKHYLDEIIEQISEFSKRVILAD--ANLDKVL-S AYN-KH---RDKPIREq- | 1305 |
| WP_003030002 | 1222 | YQIE----KNYE-PEHRE--YVEKHKDEFKELLEYISVFSRKYVLAD--NNLTKIE-M LFS-KN---KDAEVSS-- | 1281 |
| WP_003065552 | 1250 | QRIN----SENS-TKYLD--YVSAHKKEFEKVLSCVEDFANLYVDVE--KNLSKIR-A VAD-SM---DNFSIEE-- | 1309 |
| WP_001040076 | 1241 | SRYNESKgKPEEiEKKQE--FVNQHVSYFDDIFQIINDFSKRVILAD--ANLEKIN-R LYQ-DNk--ENIPVDE-- | 1306 |
| WP_001040078 | 1249 | SRYNESKgKPEEiEKKQE--FVNQHVSYFDDILQLINDFSKRVILAD--ANLEKIN-K LYQ-DNk--ENISVDE-- | 1314 |
| WP_001040080 | 1241 | SRYNESKgKPEEiEKKQE--FVNQHVSYFDDILOLINDFSKRVILAD--ANLEKIN-K LYQ-DNk--ENISVDE-- | 1306 |
| WP_001040081 | 1241 | SRYNESKgKPEEiEKKQE--FVNQHVSYFDDILOLINDFSKRVILAD--ANLEKIN-K LYQ-DNk--ENISVDE-- | 1306 |
| WP_001040083 | 1241 | SRYNESKgKPEEiEKKQE--FVNQHVSYFDDILQLINDFSKRVILAD--ANLEKIN-K LYQ-DNk--ENISVDE-- | 1306 |
| WP_001040085 | 1241 | SRYNESKgKPEEiEKKQE--FVNQHVSYFDDILQLINDESKRVILAD--ANLEKIN-K LYQ-DNk--ENISVDE-- | 1306 |
| WP_001040087 | 1241 | SRYNESKgKPEEiEKKQE--FVNQHVSYFDDILQLINDFSKRVILAD--ANLEKIN-K LYQ-DNk--ENISVDE-- | 1306 |
| WP_001040088 | 1241 | SRYNESKgKPEEiEKKQE--FVNQHVSYFDDILQLINDESKRVILAD--ANLEKIN-K LYQ-DNk--ENISVDE-- | 1306 |
| WP_001040089 | 1241 | SRYNESKgKPEEiEKKQE--FVNQHVSYFDDILOLINDFSKRVILAD--ANLEKIN-K LYQ-DNk--ENISVDE-- | 1306 |
| WP_001040090 | 1241 | SRYNESKgKPEEiEKKQE--FVNQHVSYFDDILQLINDESKRVILAD--ANLEKIN-K LYQ-DNk--ENISVDE-- | 1306 |
| WP_001040091 | 1241 | SRYNESKgKPEEiEKKQE--FVNQHVSYFDDILQLINDESKRVILAD--ANLEKIN-K LYQ-DNk--ENISVDE-- | 1306 |
| WP_001040092 | 1241 | SRYNESKgKPEEiEKKQE--FVNQHISYFDDILOLINDFSKRVILAD--ANLEKIN-K LYS-DNk--DNTPVDE-- | 1306 |
| WP_001040094 | 1241 | SRYNELKgKPEEiEQKQE--FVVQHVSYFDDILQIINDFSNRVILAD--ANLEKIN-K LYQ-DNk--ENIPVDE-- | 1306 |
| WP_001040095 | 1241 | SRYNELKgKPEEiEQKQE--FVVQHVSYFDDILQIINDFSNRVILAD--ANLEKIN-K LYQ-DNk--ENIPVDE-- | 1306 |
| WP_001040096 | 1241 | SRYNELKgKPEEiEQKQE--FVVQHVSYFDDILQIINDFSNRVILAD--ANLEKIN-K LYQ-DNk--ENIPVDE-- | 1306 |
| WP_001040097 | 1241 | SRYNELKgKPEEiEQKQE--FVVQHVSYFDDILQIINDFSNRVILAD--ANLEKIN-K LYQ-DNk--ENIPVDE-- | 1306 |
| WP_001040098 | 1241 | SRYNELKgKPEEiEQKQE--FVVQHVSYFDDILQIINDFSNRVILAD--ANLEKIN-K LYQ-DNk--ENIPVDE-- | 1306 |
| WP_001040099 | 1241 | SRYNELKgKPEEiEQKQE--FVVQHVSYFDDILQIINDFSNRVILAD--ANLEKIN-K LYQ-DNk--ENIPVDE-- | 1306 |
| WP_001040100 | 1241 | SRYNELKgKPEEEiQKQE--FVVQHVSYFDDILQIINDFSNRVILAD--ANLEKIN-K LYQ-DNk--ENIPVDE-- | 1306 |
| WP_001040104 | 1241 | SRYNESKgKPEEiEKKQE--FVNQHVSYFDDILQLINDESKRVILAD--ANLEKIN-K LYQ-DNk--ENISVDE-- | 1306 |
| WP_001040105 | 1241 | SRYNESKgKPEEiEKKQE--FVNQHVSYFDDILQLINDFSKRVILAD--ANLEKIN-K LYQ-DNk--ENISVDE-- | 1306 |
| WP_001040106 | 1241 | SRYNELKgKPEEiEQKQE--FVVQHVSYFDDILQIINDFSNRVILAD--ANLEKIN-K LYQ-DNk--ENISVDE-- | 1306 |
| WP_001040107 | 1241 | SRYNELKgKPEEiEQKQE--FVVQHVSYFDDILQIINDFSNRVILAD--ANLEKIN-K LYQ-DNk--ENISVDE-- | 1306 |
| WP_001040108 | 1241 | SRYNELKgKPEEiEQKQE--FVVQHVSYFDDILQIINDFSNRVILAD--ANLEKIN-K LYQ-DNk--ENISVDE-- | 1306 |
| WP_001040109 | 1241 | SRYNELKgKPEEiEQKQE--FVVQHVSYFDDILQIINDFSNRVILAD--ANLEKIN-K LYQ-DNk--ENISVDE-- | 1306 |
| WP_001040110 | 1241 | SRYNELKgKPEEiEQKQE--FVVQHVSYEDDILQIINDFSNRVILAD--ANLEKIN-K LYQ-DNk--ENISVDE-- | 1306 |
| WP_015058523 | 1241 | SRYNESKgKPEEiEKKQE--FVNQHVSYFDDILOLINDFSKRVILAD--ANLEKIN-K LYS-DNk--DNTPVDE-- | 1306 |
| WP_017643650 | 1241 | SRYNELKgKPEEiEQKQE--FVVQHVSYFDDILQIINDFSNRVILAD--ANLEKIN-K LYQ-DNk--ENIPVDE-- | 1306 |
| WP_017647151 | 1241 | SRYNELKgKPEEiEQKQE--FVVQHVSYFDDILQIINDFSNRVILAD--ANLEKIN-K LYQ-DNk--ENISVDE-- | 1306 |
| WP_017648376 | 1241 | SRYNELKgKPEEiEQKQE--FVVQHVSYFDDILQIINDFSNRVILAD--ANLEKIN-K LYQ-DNk--ENISVDE-- | 1306 |
| WP_017649527 | 1241 | SRYNESKgKPEEiEKKQE--FVNQHVSYFDDILOLINDFSKRVILAD--ANLEKIN-K LYQ-DNk--ENISVDE-- | 1306 |
| WP_017771611 | 1241 | SRYNELKgKPEEiEQKQE--FVVOHVSYFDDILQIINDFSNRVILAD--ANLEKIN-K LYQ-DNk--ENISVDE-- | 1306 |
| WP_017771984 | 1241 | SRYNESKgKPEEiEKKQE--FVNQHVSYFDDILQLINDESKRVILAD--ANLEKIN-K LYQ-DNk--ENISVDE-- | 1306 |
| CFQ25032 | 1241 | SRYNESKgKPEEiEKKQE--FVNQHVSYFDDILOLINDFSKRVILAD--ANLEKIN-K LYQ-DNk--ENISVDE-- | 1306 |
| CFV16040 | 1241 | SRYNESKgKPEEiEKKQE--FVNQHVSYFDDILOLINDFSKRVILAD--ANLEKIN-K LYQ-DNk--ENISVDE-- | 1306 |
| KLJ37842 | 1241 | SRYNESKgKPEEiEKKQE--FVNQHVSYFDDILQLINDFSKRVILAD--ANLEKIN-K LYQ-DNk--ENISVDE-- | 1306 |
| KLJ72361 | 1241 | SRYNESKgKPEEiEKKQE--FVNQHVSYFDDILQLINDFSKRVILAD--ANLEKIN-K LYQ-DNk--ENISVDE-- | 1306 |
| KLL20707 | 1255 | SRYNESKgKPEEiEKKQE--FVNQHVSYFDDILQLINDFSKRVILAD--ANLEKIN-K LYQ-DNk--ENISVDE-- | 1320 |
| KLL42645 | 1241 | SRYNELKgKPEEiEQKQE--FVVQHVSYFDDILQIINDFSNRVILAD--ANLEKIN-K LYQ-DNk--ENISVDE-- | 1306 |
| WP_047207273 | 1241 | SRYNESKgKPEEiEKKQE--FVNQHVSYFDDILQLINDESKRVILAD--ANLEKIN-K LYQ-DNk--ENISVDE-- | 1306 |
| WP_047209694 | 1241 | SRYNELKgKPEEiEQKQE--FVVQHVSYFDDILQIINDFSNRVILAD--ANLEKIN-K LYQ-DNk--ENIPVDE-- | 1306 |
| WP_050198062 | 1241 | SRYNESKgKPEEiEKKQE--FVNQHVSYFDDILQLINDFSKRVILAD--ANLEKIN-K LYQ-DNk--ENISVDE-- | 1306 |
| WP_050201642 | 1241 | SRYNESKgKPEEiEKKQE--FVNQHVSYFDDILOLINDFSKRVILAD--ANLEKIN-K LYQ-DNk--ENISVDE-- | 1306 |
| WP_050204027 | 1241 | SRYNELKgKPEEiEQKQE--FVVQHVSYFDDILQIINDFSNRVILAD--ANLEKIN-K LYQ-DNk--ENISVDE-- | 1306 |
| WP_050881965 | 1241 | SRYNESKgKPEEiEKKQE--FVNQHVSYFDDILOLINDFSKRVILAD--ANLEKIN-K LYQ-DNk--ENISVDE-- | 1306 |
| WP_050886065 | 1241 | SRYNESKgKPEEiEKKQE--FVNQHVSYFDDILQLINDFSKRVILAD--ANLEKIN-K LYQ-DNk--ENISVDE-- | 1306 |
| AHN30376 | 1241 | SRYNESKgKPEEiEKKQE--FVNQHVSYFDDILQLINDESKRVILAD--ANLEKIN-K LYS-DNk--DNTPVDE-- | 1306 |
| EAO78426 | 1241 | SRYNESKgKPEEiEKKQE--FVNQHVSYFDDILQLINDFSKRVILAD--ANLEKIN-K LYQ-DNk--ENISVDE-- | 1306 |
| CCW42055 | 1241 | SRYNESKgKPEEiEKKQE--FVNQHVSYFDDILQIINDFSNRVILAD--ANLEKIN-K LYQ-DNk--ENISVDE-- | 1306 |
| WP_003041502 | 1254 | KRIN----NPIN-KDHIE--YVKKHRDDFKELLNYVLEFNEKYVGAT--KNGERLK-E AVA-DF---DSKSNEE-- | 1313 |
| WP_037593752 | 1223 | YQIE----KNYE-PEHRE--YVEKHKDEFKELLEYISVFSRKYVLAD--NNLTKIE-M LFS-KN---KDAEVSS-- | 1282 |
| WP_049516684 | 1223 | YRIE----KDYE-PEHRE--YVEKHKDEFKELLEYISVFSRKYVLAD--NNLTKIE-M LFS-KN---KDAEVSS-- | 1282 |
| GAD46167 | 1222 | YQIE----KNYE-PEHRE--YVEKHKDEFKELLEYISVFSRKYVLAD--NNLTKIE-M LFS-KN---KDAEVSS-- | 1281 |
| WP_018363470 | 1254 | HRIG----NFNS-AEHLK--YVSEHKKEFEEVLSCVENFANVYVDVE--KNLSKIR-A AAD-SM---DNFSIEE-- | 1313 |
| WP_003043819 | 1249 | QNISATTgSNNLg-------YIEQHREEFKEIFEKIIDFSEKYILKN--KVNSNLK-S SFD-EQfavSDSIL--1- | 1310 |
| WP_006269658 | 1222 | YRIE----KDYE-PEHRE--YVEKHKDEFKELLEYISVFSRKYVLAD--NNLTKIE-M LFS-KN---KDAEVSS-- | 1281 |
| WP_048800889 | 1242 | HRID----NSDN-SEHLK--YITEHKEEFGKLLSYIENFAKSYVDVD--KNLEKIQ-L AVE-KI---DSFSVKE-- | 1301 |
| WP_012767106 | 1246 | -HAHKIESSKE--LEHEA--YILDHYNDLYQLLSYIERFASLYVDVE--KNISKVK-E LFS-NI---ESYSISEi- | 1308 |
| WP_014612333 | 1246 | -HAHKIESSKE--LEHEA--YILDHYNDLYQLLSYIERFASLYVDVE--KNISKVK-E LFS-NI---ESYSISEi- | 1308 |
| WP_015017095 | 1246 | -HAHKIESSKE--LEHEA--YILDHYNDLYQLLSYIERFASLYVDVE--KNISKVK-E LFS-NI---ESYSISEi- | 1308 |
| WP_015057649 | 1246 | -HAHKIESSKE--LEHEA--YILDHYNDLYQLLSYIERFASLYVDVE--KNISKVK-E LFS-NI---ESYSISEi- | 1308 |
| WP_048327215 | 1246 | -HAHKIESSKE--LEHEA--YILDHYNDLYQLLSYIERFASLYVDVE--KNISKVK-E LFS-NI---ESYSISEi- | 1308 |
| WP_049519324 | 1246 | -HAHKIESSKE--LEHEA--YILDHYNDLYQLLSYIERFASLYVDVE--KNISKVK-E LFS-NI---ESYSISEI- | 1308 |
| WP_012515931 | 1220 | AHYHELTgSSEDVLRKKY--FVDRHLHYFDDIIQMINDFAERHILAS--SNLEKIN-H TYH-NN---SDLPVNEr- | 1285 |
| WP_021320964 | 1220 | AHYHELTgSSEDVLRKKY--FVERHLHYFDDIIQMINDFAERHILAS--SNLEKIN-H TYH-NN---SDLPINEr- | 1285 |
| WP_037581760 | 1220 | AHYHELTgSSEDVLRKKY--FVERHLHYFDDIIQMINDFAERHILAS--SNLEKIN-H TYH-NN---SDLPVNEr- | 1285 |
| WP_004232481 | 1252 | QHVN----NSHK-PEHLN--YVKQHKDEFKDIFNLIISIARINILKP--KVVDNL--- -IN-EF---TEYGQED-- | 1308 |
| WP_009854540 | 1247 | HRAD----NFNS-TEYLN--YVSEHKKEFEKVLSCVEDFANLYVDVE--KNLSKIR-A VAD-SM---DNFSIEE-- | 1306 |
| WP_012962174 | 1248 | HRVN----SFNN-SEHLK--YVSEHKKEFGEVLSCVENFAKSYVDVE--KNLGKIR-A VAD-KI---DTFSIED-- | 1307 |
| WP_039695303 | 1249 | HRAD----NENS-TEYLN--YVSEHKKEFEKVLSCVEDFANLYVDVE--KNLSKIR-A VAD-SM---DNFSIEE-- | 1308 |
| WP_014334983 | 1252 | HRID----SFNS-TEHLK--YVSEHKKEFEKVLSCVENFSNLYVDVE--KNLSKVR-A AAE-SM---TNFSLEE-- | 1311 |
| WP_003099269 | 1240 | SHYTKFTgKEEDrEKKRS--YVESHLYYFDEIMQIIVEYSNRYILAD--SNLIKIQ-N LYK-EKd---NFSIEEq- | 1305 |
| AHY15608 | 1240 | SHYTKFTgKEEDrEKKRS--YVESHLYYFXEVKSSF---------------------- ------------------ | 1273 |
| AHY17476 | 1240 | SHYTKFTgKEEDrEKKRS--YVESHLYXFX---------------------------- ------------------ | 1267 |
| ESR09100 | 72 | SHYTKFTgKEEDrEKKRS--YVESHLYYFDEIMQIIVEYSNRYILAD--SNLIKIQ-N LYK--Ek--DNFSIEEq- | 137 |
| AGM98575 | 1240 | SHYTKFTgKEEDrEKKRS--YVESHLYYFDVRLSQVERVINVEF-------------- ------------------ | 1281 |
| ALF27331 | 1222 | KNIH----KVDE-PKHLD--YVKKHKDEFKELLDVVSNFSKKNILAE--SNLEKIE-E LYA-QN---NNKDITE-- | 1281 |
| WP_018372492 | 1229 | KKVDVLVKSKDD---DYD---LEEHRAEFAELLDCIKKENDMYILAS--SNMSKIE-E IYQ-KNi---DAPIEE-- | 1289 |
| WP_045618028 | 1252 | QRIN----KISE-PIHKQ--YVETHQSEFKELLTAIISLSKKYI-QK--PNVESL--- LQQ-AF---DQSDKDIyq | 1310 |
| WP_045635197 | 1247 | KNVH----KLDE-PGHLE--YIQKHRNEFKDLLNLVSEFSQKYVLAD--ANLEKIK-S LYA-DN---EQADIEI-- | 1306 |
| WP_002263549 | 1222 | KNIH----KVDE-PKHLD--YVDKHKDEFKELLDVVSNFSKKYTLAE--GNLEKIK-E LYA-QN---NGEDLKE-- | 1281 |
| WP_002263887 | 1222 | KNIH----KVDE-PKHLD--YVDKHKDEFKELLDVVSNFSKKYTLAE--GNLEKIK-E LYA-QN---NGEDLKE-- | 1281 |
| WP_002264920 | 1222 | KNIH----KVDE-PKHLD--YVDKHKDEFKELLDVVSNFSKKYTLAE--GNLEKIK-E LYA-QN---NGEDLKE-- | 1281 |
| WP_002269043 | 1222 | KNIH----KVDE-PKHLD--YVDKHKDEFKELLDVVSNFSKKYTLAE--GNLEKIK-E LYA-QN---NGEDLKE-- | 1281 |
| WP_002269448 | 1222 | KNIH----KVDE-PKHLD--YVDKHKDEFKELLDVVSNFSKKYTLAE--GNLEKIK-E LYA-QN---NGEDLKE-- | 1281 |
| WP_002271977 | 1222 | KNIH----KVDE-PKHLD--YVDKHKDEFKELLDVVSNFSKKYTLAE--GNLEKIK-E LYA-QN---NGEDLKE-- | 1281 |
| WP_002272766 | 1222 | KNIH----KVDE-PKHLD--YVDKHKDEFKELLDVVSNFSKKYTLAE--GNLEKIK-E LYA-QN---NGEDLKE-- | 1281 |
| WP_002273241 | 1222 | KNIH----KVDE-PKHLD--YVDKHKDEFKELLDVVSNFSKKYTLAE--GNLEKIK-E LYA-QN---NGEDLKE-- | 1281 |
| WP_002275430 | 1222 | KNIH----KVDE-PKHLD--YVDKHKDEFKELLDVVSNFSKKYTLAE--GNLEKIK-E LYA-QN---NGEDLKE-- | 1281 |
| WP_002276448 | 1222 | KNIH----KVDE-PKHLD--YVDKHKDEFKELLDVVSNFSKKYTLAE--GNLEKIK-E LYA-QN---NGEDLKE-- | 1281 |
| WP_002277050 | 1230 | HHL-------DN-DYSNE--YVKNHYQQFDILFNEITSFSKKCKLGK--EHIQKIE-E AYSKER---DSASIEE-- | 1287 |
| WP_002277364 | 1222 | KNIH----KVDE-PKHLD--YVDKHKDEFKELLDVVSNFSKKYTLAE--GNLEKIK-E LYA-QN---NGEDLKE-- | 1281 |
| WP_002279025 | 1222 | KNIH----KVDE-PKHLD--YVDKHKDEFKELLDVVSNFSKKYTLAE--GNLEKIK-E LYA-ON---NGEDLKE-- | 1281 |
| WP_002279859 | 1222 | KNIH----KVDE-PKHLD--YVDKHKDEFKELLDVVSNFSKKYTLAE--GNLEKIK-E LYA-QN---NGEDLKE-- | 1281 |
| WP_002280230 | 1222 | KNIH----KVDE-PKHLD--YVDKHKDEFKELLDVVSNFSKKYTLAE--GNLEKIK-E LYA-QN---NGEDLKE-- | 1281 |
| WP_002281696 | 1222 | KNIH----KVDE-PKHLD--YVDKHKDEFKELLDVVSNFSKKYTLAE--GNLEKIK-E LYA-QN---NGEDLKE-- | 1281 |
| WP_002282247 | 1230 | HHL-------DN-DYSNE--YVKNHYQQFDILFNEITSFSKKCKLGK--EHIQKIE-E AYSKER---DFASIEE-- | 1287 |
| WP_002282906 | 1222 | KNIH----KVDE-PKHLD--YVDKHKDEFKELLDVVSNFSKKYTLAE--GNLEKIK-E LYA-QN---NGEDLKE-- | 1281 |
| WP_002283846 | 1222 | KNIH----KVDE-PKHLD--YVDKHKDEFKELLDVVSNFSKKYTLAE--GNLEKIK-E LYA-QN---NGEDLKE-- | 1281 |
| WP_002287255 | 1222 | KNIH----KVDE-PKHLD--YVDKHKDEFKELLDVVSNFSKKYTLAE--GNLEKIK-E LYA-QN---NGEDLKE-- | 1281 |
| WP_002288990 | 1222 | KNIH----KVDE-PKHLD--YVDKHKDEFKELLDVVSNFSKKYTLAE--GNLEKIK-E LYA-QN---NGEDLKE-- | 1281 |
| WP_002289641 | 1222 | KNIH----KVDE-PKHLD--YVDKHKDEFKELLDVVSNFSKKYTLAE--GNLEKIK-E LYA-QN---NGEDLKE-- | 1281 |
| WP_002290427 | 1222 | KNIH----KVDE-PKHLD--YVDKHKDEFKELLDVVSNFSKKYTLAE--GNLEKIK-E LYA-QN---NGEDLKE-- | 1281 |
| WP_002295753 | 1222 | KNIH----KVDE-PKHLD--YVDKHKDEFKELLDVVSNFSKKYTLAE--GNLEKIK-E LYA-QN---NGEDLKE-- | 1281 |
| WP_002296423 | 1222 | KNIH----KVDE-PKHLD--YVDKHKDEFKELLDVVSNFSKKYTLAE--GNLEKIK-E LYA-QN---NGEDLKE-- | 1281 |
| WP_002304487 | 1236 | KNIH----KVDE-PKHLD--YVDKHKDEFKELLDVVSNFSKKYTLAE--GNLEKIK-E LYA-ON---NGEDLKE-- | 1295 |
| WP_002305844 | 1222 | KNIH----KVDE-PKHLD--YVDKHKDEFKELLDVVSNFSKKYTLAE--GNLEKIK-E LYA-QN---NGEDLKE-- | 1281 |
| WP_002307203 | 1222 | KNIH----KVDE-PKHLD--YVDKHKDEFKELLDVVSNFSKKYTLAE--GNLEKIK-E LYA-QN---NGEDLKE-- | 1281 |
| WP_002310390 | 1222 | KNIH----KVDE-PKHLD--YVDKHKDEFKELLDVVSNFSKKYTLAE--GNLEKIK-E LYA-QN---NGEDLKE-- | 1281 |
| WP_002352408 | 1222 | KNIH----KVDE-PKHLD--YVDKHKDEFKELLDVVSNFSKKYTLAE--GNLEKIK-E LYA-QN---NGEDLKE-- | 1281 |
| WP_012997688 | 1222 | KNIH----KVDE-PKHLD--YVDKHKDEFKELLDVVSNFSKKYTLAE--GNLEKIK-E LYA-QN---NGEDLKE-- | 1281 |
| WP_014677909 | 1222 | KNIH----KVDE-PKHLD--YVDKHKDEFKELLDVVSNFSKKYTLAE--GNLEKIK-E LYA-QN---NGEDLKE-- | 1281 |
| WP_019312892 | 1222 | KNIH----KVDE-PKHLD--YVDKHKDEFKELLDVVSNFSKKYTLAE--GNLEKIK-E LYA-QN---NGEDLKE-- | 1281 |
| WP_019313659 | 1222 | KNIH----KVDE-PKHLD--YVDKHKDEFKELLDVVSNFSKKYTLAE--GNLEKIK-E LYA-QN---NGEDLKE-- | 1281 |
| WP_019314093 | 1222 | KNIH----KVDE-PKHLD--YVDKHKDEFKELLDVVSNFSKKYTLAE--GNLEKIK-E LYA-QN---NGEDLKE-- | 1281 |
| WP_019315370 | 1222 | KNIH----KVDE-PKHLD--YVDKHKDEFKELLDVVSNFSKKYTLAE--GNLEKIK-E LYA-QN---NGEDLKE-- | 1281 |
| WP_019803776 | 1222 | KNIH----KVDE-PKHLD--YVDKHKDEFKELLDVVSNFSKKYTLAE--GNLEKIK-E LYA-QN---NGEDLKE-- | 1281 |
| WP_019805234 | 1222 | KNIH----KVDE-PKHLD--YVDKHKDEFKELLDVVSNFSKKYTLAE--GNLEKIK-E LYA-QN---NGEDLKE-- | 1281 |
| WP_024783594 | 1222 | KNIH----KVDE-PKHLD--YVDKHKDEFKELLDVVSNFSKKYTLAE--GNLEKIK-E LYA-QN---NGEDLKE-- | 1281 |
| WP_024784288 | 1230 | HHL-------DN-DYSNE--YVKNHYQQFDILFNEITSFSKKCKLGK--EHIQKIE-E AYSKER---DFASIEE-- | 1287 |
| WP_024784666 | 1222 | KNIH----KVDE-PKHLD--YVDKHKDEFKELLDVVSNFSKKYTLAE--GNLEKIK-E LYA-QN---NGEDLKE-- | 1281 |
| WP_024784894 | 1222 | KNIH----KVDE-PKHLD--YVDKHKDEFKELLDVVSNFSKKYTLAE--GNLEKIK-E LYA-QN---NGEDLKE-- | 1281 |
| WP_024786433 | 1230 | HHL-------DN-DYSNE--YVKNHYQQFDILFNEITSFSKKCKLGK--EHIQKIE-E AYSKER---DSASIEE-- | 1287 |
| WP_049473442 | 1222 | KNIH----KVDE-PKHLD--YVDKHKDEFKELLDVVSNFSKKYTLAE--GNLEKIK-E LYA-QN---NGEDLKE-- | 1281 |
| WP_049474547 | 1222 | KNIH----KVDE-PKHLD--YVDKHKDEFKELLDVVSNFSKKYTLAE--GNLEKIK-E LYA-QN---NGEDLKE-- | 1281 |
| EMC03581 | 1215 | KNIH----KVDE-PKHLD--YVDKHKDEFKELLDVVSNFSKKYTLAE--GNLEKIK-E LYA-QN---NGEDLKE-- | 1274 |
| WP_000428612 | 1250 | KNIH----RLDE-PEHLE--YIQKHRNEFKGLLNLVSEFSQKYVLAD--ANLEKIK-N LYA-DN---EQADIEI-- | 1309 |
| WP_000428613 | 1248 | KNVH----KLDE-PEHLE--YIQKHRNEFKDLLNLVSEFSQKYVLAD--ANLEKIQ-N LYA-DN---EQADIEI-- | 1307 |
| WP_049523028 | 1243 | KRIQ----KKDE-PEHLE--YIKQHHSEFNDLLNFVSEFSQKYVLAE--SNLEKIK-N LYI-DN---EQTNMEE-- | 1302 |
| WP_003107102 | 1209 | SRYTSFSgKEEDrEKHRH--FVESHLHYFDEIKDIIADFSRRYILAD--ANLEKIL-T LYN-EKn---QFSIEEq- | 1274 |
| WP_054279288 | 1242 | SKRDK--gTQSEnME-----YISNHKEKFIEIFHYIIRYAEKNVIKP--KVIERLN-D TFNqKF---NDSDLTE1- | 1303 |
| WP_049531101 | 1252 | QRIN----KISE-PIHKQ--YVETHOSEFEELLTTIISLSKKYI-QK--PIVESL--- LQQ-AF---EQADKDIyq | 1310 |
| WP_049538452 | 1252 | QRIN----KISE-PIHKQ--YVEAHQNEFKELLTTIISLSKKYI-QK--PNVESL--- LQQ-AF---EQADKDIyq | 1310 |
| WP_049549711 | 1254 | QRIN----KFSE-PIHKQ--YVEAHQNEFKELLTIIISLSKKYI-QK--PNVESL--- LHQ-AF---EQADNDIyq | 1312 |
| WP_007896501 | 1246 | SRYDKLSSKIESeQQKKL--FVEQHLHYFDEILDIVVKHATCYIKAE--NNLKKII-S LYK-KK---EAYSINEq- | 1311 |
| EFR44625 | 1198 | SRYDKLSSKIESeQQKKL--FVEQHLHYFDEILDIVVKHATCYIKAE--NNLKKII-S LYK-KK---EAYSINEq- | 1263 |
| WP_002897477 | 1247 | KNLH----KLDE-PEHLE--YIQKHRNEFKDLLNLVSEFSQKYILAE--ANLEKIK-D LYA-DN---EQADIEI-- | 1306 |
| WP_002906454 | 1253 | QRIN----KISE-PIHKQ--YVEAHQNEFKELLTTIISLSKKYI-QK--PNVELL--- LQQ-AF---DQADKDIyq | 1311 |
| WP_009729476 | 1248 | KNVH----KLDE-PGHLE--YIQKHRNEFKDLLNLVSEFSQKYVLAD--ANLEKIK-N LYA-DN---EQADIEI-- | 1307 |
| CQR24647 | 1238 | QHAN----KEDS----VI--YLEKHRHELSELFHHIIGVSEKTILKP--KVEMTLN-E AFE-KHf--EFDEVSE-- | 1295 |
| WP_000066813 | 1252 | KNVH----KLDE-PEHLE--YIQKHRYEFKDLLNLVSEFSQKYVLAD--ANLEKIK-N LYA-DN---EQADIEI-- | 1311 |
| WP_009754323 | 1248 | KNVH----KLDE-PEHLE--YIQKHRYEFKDLLNLVSEFSQKYVLAE--ANLEKIK-S LYV-DN---EQADIEI-- | 1307 |
| WP_044674937 | 1241 | SNIH----KITE-PIHLN--YVNKNKHEFKELLRHISDFSTRYILAQ--DRLSKIE-E LYD-KN---DGDDISD-- | 1300 |
| WP_044676715 | 1243 | SNIH----KITE-PIHLN--YVNKNKHEFKELLRHISDFSTRYILAQ--DRLSKIE-E LYD-KN---DGDDISD-- | 1302 |
| WP_044680361 | 1243 | SNIH----KITE-PIHLN--YVNKNKHEFKELLRHISDFSTRYILAQ--DRLSKIE-E LYD-KN---DGDDISD-- | 1302 |
| WP_044681799 | 1241 | SNIH----KITE-PIHLN--YVNKNKHEFKELLRHISDFSTRYILAQ--DRLSKIE-E LYD-KN---DGDDISD-- | 1300 |
| WP_049533112 | 1254 | KRIN----NPIN-KDHIE--YVKKHRDDFKELLNYVLEFNEKYVGAT--KNGERLK-E AVA-DF---DSKSNEE-- | 1313 |
| WP_029090905 | 1182 | STKQA-----DE-AMFLKyyRLEHLEAVFEEL---IRKQAADYQIFE--KLIKKIEvN FYS----c----TYNEk- | 1240 |
| WP_006506696 | 1212 | YNAIYKQ-DYDNIDDILMi-----------QLYIELTNKMKVLYPAY-rGIAEKFE-S YVV----i----SKEEk- | 1268 |
| AIT42264 | 1240 | SHYEKLKgSPEDnEQKOL--FVEQHKHYLDEIIEQISEFSKRVILAD--ANLDKVL-S AYN-KH---RDKPIREq- | 1305 |
| WP_034440723 | 1218 | KHYNE-----DE--TSHK--FIVEHKAYFDELLNYIVEFANKYLELE--NSIEKIK-D LYH-----gKGPDVEEke | 1276 |
| AKQ21048 | 1240 | SHYEKLKgSPEDnEQKOL--FVEQHKHYLDEIIEQISEFSKRVILAD--ANLDKVL-S AYN-KH---RDKPIREq- | 1305 |
| WP_004636532 | 1212 | NRYDKVK-----fPDSIE--YVHDNLAKFDDLLEYVIDESNKYINAD--KNVQKIQ-K IYK-EH---GTEDVEL-- | 1271 |
| WP_002364836 | 1218 | KQCLL----PNQ-SESLA--YVEQHQPEFQEILERVVDFAEVHTLAK--SKVQQIV-K LFE-AN---QTADVKE-- | 1277 |
| WP_016631044 | 1169 | KQCLL----PNQ-SESLA--YVEQHOPEFQEILERVVDFAEVHTLAK--SKVQQIV-K LFE-AN---QTADVKE-- | 1228 |
| EMS75795 | 954 | QHYDEIAhKESF-----D--YVNDHLSEFREILDQVIDFSNRYTIAA--KNTEKIA-E LFE-QN---QESTVQS-- | 1013 |
| WP_002373311 | 1218 | KOCLL----PNQ-SESLA--YVEQHQPEFQEILERVVDFAEVHTLAK--SKVQQIV-K LFE-AN---QTADVKE-- | 1277 |
| WP_002378009 | 1218 | KQCLL----PNQ-SESLA--YVEQHOPEFQEILERVVDFAEVHTLAK--SKVQQIV-K LFE-AN---QTADVKE-- | 1277 |
| WP_002407324 | 1218 | KQCLL----PNQ-SESLA--YVEQHQPEFQEILERVVDFAEVHTLAK--SKVQQIV-K LFE-AN---QTADVKE-- | 1277 |
| WP_002413717 | 1218 | KQCLL----PNQ-SESLA--YVEQHOPEFQEILERVVDFAEVHTLAK--SKVQQIV-K LFE-AN---QTADVKE-- | 1277 |
| WP_010775580 | 1220 | KQCLL----PNQ-SESLA--YVEQHOPEFQEILERVVDFAEVHTLAK--SKVOQIV-K LFE-AN---QTADVKE-- | 1279 |
| WP_010818269 | 1218 | KQCLL----PNQ-SESLA--YVEQHOPEFQEILERVVDFAEVHTLAK--SKVQQIV-K LFE-AN---QTADVKE-- | 1277 |
| WP_010824395 | 1218 | KQCLL----PNQ-SESLA--YVEQHOPEFQEILERVVDFAEVHTLAK--SKVQQIV-K LFE-AN---QTADVKE-- | 1277 |
| WP_016622645 | 1218 | KQCLL----PNQ-SESLA--YVEQHOPEFQEILERVVDFAEVHTLAK--SKVQQIV-K LFE-AN---QTADVKE-- | 1277 |
| WP_033624816 | 1218 | KQCLL----PNQ-SESLA--YVEQHOPEFQEILERVVDFAEVHTLAK--SKVQQIV-K LFE-AN---QTADVKE-- | 1277 |
| WP_033625576 | 1218 | KQCLL----PNQ-SESLA--YVEQHOPEFQEILERVVDFAEVHTLAK--SKVQQIV-K LFE-TN---QTADVKE-- | 1277 |
| WP_033789179 | 1218 | KOCLL----PNQ-SESLA--YVEQHOPEFQEILERVVDFAEVHTLAK--SKVQQIV-K LFE-AN---QTADVKE-- | 1277 |
| WP_002310644 | 1220 | KQYDEIShKESF-----D--YVNEHHKEFSEVFARVLEFAGKYTLAE--KNIEKLE-K IYK-EN---QTDDLAK-- | 1279 |
| WP_002312694 | 1221 | KQYDEIShKESF-----D--YVNEHHKEFSEVFARVLEFAGKYTLAE--KNIEKLE-K IYK-EN---QTDDLAK-- | 1280 |
| WP_002314015 | 1221 | KQYDEIShKESF-----D--YVNEHHKEFSEVFARVLEFAGKYTLAE--KNIEKLE-K IYK-EN---QTDDLAK-- | 1280 |
| WP_002320716 | 1221 | KQYDEIShKESF-----D--YVNEHHKEFSEVFARVLEFAGKYTLAE--KNIEKLE-K IYK-EN---QTDDLAK-- | 1280 |
| WP_002330729 | 1220 | KQYDEIShKESF-----D--YVNEHHKEFSEVFARVLEFAGKYTLAE--KNIEKLE-K IYK-EN---QTDDLAK-- | 1279 |
| WP_002335161 | 1221 | KQYDEIShKESF-----D--YVNEHHKEFSEVFARVLEFAGKYTLAE--KNIEKLE-K IYK-EN---QTDDLAK-- | 1280 |
| WP_002345439 | 1221 | KQYDEIShKESF-----D--YVNEHHKEFSEVFARVLEFAGKYTLAE--KNIEKLE-K IYK-EN---QTDDLAK-- | 1280 |
| WP_034867970 | 1211 | QHYDKITyQESF-----D--YVNTHLSDFSAILTEVLAFAEKYTLAD--KNIERIQ-E LYE-EN---KYGETSM-- | 1270 |
| WP_047937432 | 1221 | KQYDEIShKESF-----D--YVNEHHKEFSEVFARVLEFAGKYTLAE--KNIEKLE-K IYK-EN---QTDDLAK-- | 1280 |
| WP_010720994 | 1211 | QHYDKITyQESF-----D--YVNTHLSDFSAILTEVLAFAEKYTLAD--KNIERIQ-E LYE-EN---KYGEISM-- | 1270 |
| WP_010737004 | 1211 | QHYDKITyQESF-----D--YVNTHLSDFSAILTEVLAFAEKYTLAD--KNIERIQ-E LYE-EN---KYGETSM-- | 1270 |
| WP_034700478 | 1211 | QHYDKITyQESF-----D--YVNTHLSDFSAILTEVLAFAEKYTLAD--KNIERIQ-E LYE-EN---KYGEISM-- | 1270 |
| WP_007209003 | 1209 | KKIIN--gKNSD---SVS--YIQNNKEKFREIFEYIVDFSSKYISAD--ANLNKIE-K IFE-NNfh----KASEqe | 1269 |
| WP_023519017 | 1205 | RHYDEINhKVSF-----D--YVNAHKEGENDIFDFISDFGVRYILAP--QHLEKIK-V AYE-KN---KEVDLKE-- | 1264 |
| WP_010770040 | 1216 | KOVDE-----DS-GKSEE--YVREHRAEFAEILNYVQAFSETKILAN--KNLQTIL-K LYE-EN---KEADIKE-- | 1274 |
| WP_048604708 | 1213 | KHCNE-----KP-D-SLK--YVTEHQSGFSEIMAHVKDFAEKYTLVD--KNLEKIL-S LYA-KN---MDSEVKE-- | 1270 |
| WP_010750235 | 1214 | NHYDEIAyKDSY-----D--YVNEHFSNFQDILDKVIIFAEKYTSAP--QKLNQII-A TYE-KN---QEADRKI-- | 1273 |
| AII16583 | 1279 | SHYEKLKgSPEDNEQKQL--FVEQHKHYLDEIIEQISEFSKRVILAD--ANLDKVL-S AYN-KH---RDKPIREq- | 1344 |
| WP_029073316 | 1226 | YKAMKYK-NYSE1SQEEIm-----------NVYDIFVEKLKLYYPTY-KNIATNFE-N FEN----1----SDEEk- | 1282 |
| WP_031589969 | 1226 | YKAMKYK-NYDNIDSEKII-----------DLYRLLINKMELYYPEYrkQLVKKFE-D LKV----i----SIEEk- | 1283 |
| KDA45870 | 1200 | NAKDG--------EQKLE-----DHKAEFKELFDKIMEFADKYVVAP--KNSEKIR-R LYE-ENq-----DATPme | 1253 |
| WP_039099354 | 1242 | LPLTQ-----SEeLAEQV----------YDEILDQVMHYFPLYDTNQfrAKLSAGKaA DGN-KMv-----QVGQqv | 1306 |
| AKP02966 | 1238 | QIPDE-----DpDQILAf----YDKNILVEILQELITKMKKFYPFY--KNEQEFLaS FNQ--------ATTSEk-- | 1296 |
| WP_010991369 | 1216 | ANCEV-----SD-GKSLD--YIESNREMFAELLAHVSEFAKRYTLAE--ANLNKIN-Q LFE-QN---KEGDIKA-- | 1274 |
| WP_033838504 | 1216 | ANCEV-----SD-GKSLD--YIESNREMFAELLAHVSEFAKRYTLAE--ANLNKIN-Q LFE-QN---KEGDIKA-- | 1274 |
| EHN60060 | 1219 | ANCEV-----SD-GKSLD--YIESNREMFAELLAHVSEFAKRYTLAE--ANLNKIN-Q LFE-QN---KEGDIKA-- | 1277 |
| EFR89594 | 985 | ANCEV-----SD-GKSLD--YIESNREMFAELLAHVSEFAKRYTLAE--ANLNKIN-Q LFE-QN---KEGDIKA-- | 1043 |
| WP_038409211 | 1216 | KNCEA-----ND-GESLA--YIEMHREMFAELLAYISEFAKRYTLAN--DRLEKIN-M FFE-QN---KKGDIKV-- | 1274 |
| EFR95520 | 835 | KNCEA-----ND-GESLA--YIEMHREMFAELLAYISEFAKRYTLAN--DRLEKIN-M FFE-QN---KKGDIKV-- | 893 |
| WP_003723650 | 1216 | KNCEA-----SD-GKSLK--YIEAHRETFSELLAQVSEFATRYTLAD--ANLSKIN-N LFE-QN---KEGDIKA-- | 1274 |
| WP_003727705 | 1216 | KNCEA-----SD-GKSLK--YIEAHRETFSELLAQVSEFATKYTLAD--ANLSKIN-N LFE-QN---KEGDIKA-- | 1274 |
| WP_003730785 | 1216 | KNCEA-----SD-GKSLK--YIEAHRETFSELLAQVSEFATKYTLAD--ANLSKIN-N LFE-QN---KEGDIKA-- | 1274 |
| WP_003733029 | 1216 | EKYEA-----ID-GESLA--YIEVHRALFDELLAYISEFARKYTLSN--DRLDEIN-M LYE-RN---KDGDVKS-- | 1274 |
| WP_003739838 | 1216 | KNCEA-----SD-GKSLD--YIESNREMFGELLAHVSEFAKRYTLAD--ANLSKIN-Q LFE-QN---KDNDIKV-- | 1274 |
| WP_014601172 | 1216 | KNCEA-----SD-GKSLK--YIEAHRETFSELLAQVSEFATRYTLAD--ANLSKIN-N LFE-QN---KEGDIQA-- | 1274 |
| WP_023548323 | 1216 | EKREA-----ID-GESLA--YIEAHKAVFGELLAHISEFARKYTLAN--DKLDEIN-M LYE-RN---KDGDVKS-- | 1274 |
| WP_031665337 | 1216 | KNCEA-----SD-GKSLK--YIEAHRETFSELLAQVSEFATRYTLAD--ANLSKIN-N LFE-QN---KEGDIKA-- | 1274 |
| WP_031669209 | 1216 | EKYEA-----ID-GESLA--YIEVHRALFDELLAYISEFARKYTLSN--DRLDEIN-M LYE-RN---KDGDVKS-- | 1274 |
| WP_033920898 | 1216 | EKREA-----ID-GESLA--YIEAHKAVFGELLAHISEFARKYTLAN--DKLDEIN-M LYE-RN---KDGDVKS-- | 1274 |
| AKI42028 | 1219 | KNCEA-----SD-GKSLK--YIEAHRETFSELLAQVSEFATRYTLAD--ANLSKIN-N LFE-QN---KEGDIQA-- | 1277 |
| AKI50529 | 1219 | EKREA-----ID-GESLA--YIEAHKAVFGELLAHISEFARKYTLAN--DKLDEIN-M LYE-RN---KDGDVKS-- | 1277 |
| EFR83390 | 664 | KNCEA-----SD-GKSLK--YTEAHRETFSELLAQVSEFATRYTLAD--ANLSKIN-N LFE-QN---KEGDIKX-- | 722 |
| WP_046323366 | 1216 | KNCEA-----SD-GKSLA--YIESHREMFAELLDSISEFASRYTLAD--ANLEKIN-T IFE-QN---KSGDVKV-- | 1274 |
| AKE81011 | 1256 | SHYEKLKgSPEDnEQKOL--FVEQHKHYLDEIIEQISEFSKRVILAD--ANLDKVL-S AYN-KH---RDKPIREq- | 1321 |
| CUO82355 | 1216 | YNAIYKQ-DFDGIDNMLMi-----------QLYLQLIDKLKTLYPIY-mGIVEKFE-K FVS----i----SKEEk- | 1272 |
| WP_033162887 | 1218 | YAAMLKK-RYEYIDEEEIf-----------DLYLQLLQKMDTLYPAY-kGIAKRFF-D FKN----i----DVVEK- | 1274 |
| AGZ01981 | 1273 | SHYEKLKgSPEDnEQKOL--FVEQHKHYLDEIIEQISEFSKRVILAD--ANLDKVL-S AYN-KH---RDKPIREq- | 1338 |
| AKA60242 | 1240 | SHYEKLKgSPEDnEQKOL--FVEQHKHYLDEIIEQISEFSKRVILAD--ANLDKVL-S AYN-KH---RDKPIREq- | 1305 |
| AKS40380 | 1240 | SHYEKLKgSPEDNEQKQL--FVEQHKHYLDEIIEQISEFSKRVILAD--ANLDKVL-S AYN-KH---RDKPIREq- | 1305 |
| 4UN5_B | 1244 | SHYEKLKgSPEDnEQKQL--FVEQHKHYLDEIIEQISEFSKRVILAD--ANLDKVL-S AYN-KH---RDKPIREq- | 1309 |
| WP_010922251 | 1306 | [chemical structure] | 1365 |
| WP_039695303 | 1309 | ISN---SFI NLLTLTALGAP-ADFNFLG--EKI--PRK--R-YTSTKECL NATLIHQSITGLYETRIDLSKL-- | 1369 |
| WP_045635197 | 1307 | LAN---SFI NLLTFTALGAP-AAFKFFG--KDI--DRK--R-YTTVSEIL NATLIHQSITGLYETWIDLSKL-- | 1367 |
| 5AXW_A | | --------- ----------------------------------------- ------------------------ | |
| WP_009880683 | 990 | -AE---NII HLFTLTNLGAP-AAFKCFD--TTI--GRN--R-YKSIKEVL DATLIHQSITGLYETRIDLSQL-- | 1049 |
| WP_010922251 | 1306 | -AE---NII HLFTLTNLGAP-AAFKYFD--TTI--DRK--R-YTSTKEVL DATLIHQSITGLYETRIDLSQL-- | 1365 |
| WP_011054416 | 1306 | -AE---NII HLFTLTNLGAP-AAFKYFD--TTI--DRK--R-YTSTKEVL DATLIHQSITGLYETRIDLSQL-- | 1365 |
| WP_011284745 | 1306 | -AE---NII HLFTLTNLGAP-AAFKYFD--TTI--DRK--R-YTSTKEVL DATFIHQSITGLYETRIDLSQL-- | 1365 |
| WP_011285506 | 1306 | -AE---NII HLFTLTNLGAP-AAFKYFD--TTI--DRK--R-YTSTKEVL DATLIHQSITGLYETRIDLSQL-- | 1365 |
| WP_011527619 | 1306 | -AE---NII HLFTLTNLGAP-TAFKYFD--TTI--DRK--R-YTSTKEVL DATFIHQSITGLYETRIDLSQL-- | 1365 |
| WP_012560673 | 1306 | -AE---NII HLFTLTNLGAP-AAFKCFD--TTI--GRN--R-YKSIKEVL DATLIHQSITGLYETRIDLSQL-- | 1365 |
| WP_014407541 | 1305 | -AE---NII HLFTLTNLGAP-AAFKYFD--TTI--DRK--R-YTSTKEVL DATLIHQSITGLYETRIDLSQL-- | 1364 |
| WP_020905136 | 1306 | -AE---NII HLFTLTNLGAP-AAFKYFD--TTI--DRK--R-YTSTKEVL DATLIHQSITGLYETRIDLSQL-- | 1365 |
| WP_023080005 | 1305 | -AK---NII HLFTLTNLGAP-AAFKYFD--TTI--ERN--R-YKSIKEVL DATLIHQSITGLYETRIDLSQL-- | 1364 |
| WP_023610282 | 1305 | -AK---NII HLFTLTNLGAP-AAFKYFD--TTI--ERN--R-YKSIKEVL DATLIHQSITGLYEIRIDLSQL-- | 1364 |
| WP_030125963 | 1306 | -AE---NII HLFTLTNLGAP-AAFKYFD--TTI--GRN--R-YKSIKEVL DATLIHQSITGLYETRIDLSQL-- | 1365 |
| WP_030126706 | 1306 | -AE---NII HLFTLTNLGAP-AAFKYFD--TTI--DRK--R-YTSTKEVL DATLIHQSITGLYETRIDLSQL-- | 1365 |
| WP_031488318 | 1306 | -AE---NII HLFTLTNFGAP-AAFIYFD--TTI--GRN--R-YKSIKEVL DATLIHQSITGLYETRIDLSQL-- | 1365 |
| WP_032460140 | 1306 | -AE---NII HLFTLTNLGAP-AAFKYFD--TTI--GRN--R-YKSIKEVL DATLIHQSITGLYETRIDLSQL-- | 1365 |
| WP_032461047 | 1306 | -AE---NII HLFTLTNLGAP-AAFKYFD--TTI--GRN--R-YKSIKEVL DATLIHQSITGLYETRIDLSQL-- | 1365 |
| WP_032462016 | 1306 | -AE---NII HLFTLTNLGAP-AAFKYFD--TTI--DRK--R-YTSTKEVL DATLIHQSITGLYETRIDLSQL-- | 1365 |
| WP_032462936 | 1306 | -AE---NII HLFTLTNLGAP-AAFKYFD--TTI--DRK--R-YTSTKEVL DATLIHQSITGLYETRIDLSQL-- | 1365 |
| WP_032464890 | 1306 | -AE---NII HLFTLTNLGAP-TAFKYFD--TTI--DRK--R-YTSTKEVL DATFIHQSITGLYETRIDLSQL-- | 1365 |
| WP_033888930 | 1131 | -AE---NII HLFTLTNLGAP-AAFKYFD--TTI--DRK--R-YTSTKEVL DATLIHQSITGLYETRIDLSQL-- | 1190 |
| WP_038431314 | 1306 | -AE---NII HLFTLTNLGAP-AAFKYFD--TTI--DRK--R-YTSTKEVL DATLIHQSITGLYETRIDLSQL-- | 1365 |
| WP_038432938 | 1305 | -AK---NII HLFTLTNLGAP-AAFKYFD--TTI--ERN--R-YKSIKEVL DATLIHQSITGLYETRIDLSQL-- | 1364 |
| WP_038434062 | 1306 | -AE---NII HLFTLTNLGAP-AAFKYFD--TTI--GRN--R-YKSIKEVL DATLIHQSITGLYETRIDLSQL-- | 1365 |
| BAQ51233 | 1217 | -AE---NII HLFTLTNLGAP-AAFKYFD--TTI--DRK--R-YTSTKEVL DATLIHQSITGLYETRIDLSQL-- | 1276 |
| KGE60162 | 481 | -AE---NII HLFTLTNLGAP-AAFKYFD--TTI--DRK--R-YTSTKEVL DATLIHQSITGLYETRIDLSQL-- | 540 |
| KGE60856 | 244 | -AE---NII HLFTLTNLGAP-AAFKYFD--TTI--DRK--R-YTSTKEVL DATLIHQSITGLYETRIDLSQL-- | 303 |
| WP_002989955 | 1306 | -AE---NII HLFTLTNLGAP-TAFKYFD--TTI--DRK--R-YTSTKEVL DATFIHQSITGLYETRIDLSQL-- | 1365 |
| WP_003030002 | 1282 | LAK---SFI SLLTFTAFGAP-AAFNFFG--ENI--DRK--R-YTSVTECL NATLIHQSITGLYETRIDLSKL-- | 1342 |
| WP_003065552 | 1310 | ISN---SFI NLLTLTALGAP-ADFNFLG--EKI--PRK--R-YTSTKECL NATLIHQSITGLYETRIDLSKI-- | 1370 |
| WP_001040076 | 1307 | LAN---NII NLFTFTSLGAP-AAFKFFD--KIV--DRK--R-YTSTKEVL NSTLIHQSITGLYETRIDLGKL-- | 1367 |
| WP_001040078 | 1315 | LAN---NII NLFTFTSLGAP-AAFKFFD--KIV--DRK--R-YTSTKEVL NSTLIHQSITGLYETRIDLSKL-- | 1375 |
| WP_001040080 | 1307 | LAN---NII NLFTFTSLGAP-AAFKFFD--KIV--DRK--R-YTSTKEVL NSTLIHQSITGLYETRIDLGKL-- | 1367 |
| WP_001040081 | 1307 | LAN---NII NLFTFTSLGAP-AAFKFFD--KIV--DRK--R-YTSTKEVL NSTLIHQSITGLYETRIDLGKL-- | 1367 |
| WP_001040083 | 1307 | LAN---NII NLFTFTSLGAP-AAFKFFD--KIV--DRK--R-YTSTKEVL NSTLIHQSITGLYETRIDLGKL-- | 1367 |
| WP_001040085 | 1307 | LAN---NII NLFTFTSLGAP-AAFKFFD--KIV--DRK--R-YTSTKEVL NSTLIHQSITGLYETRIDLGKL-- | 1367 |
| WP_001040087 | 1307 | LAN---NII NLFTFTSLGAP-AAFKFFD--KIV--DRK--R-YTSTKEVL NSTLIHQSITGLYETRIDLGKL-- | 1367 |
| WP_001040088 | 1307 | LAN---NII NLFTFTSLGAP-AAFKFFD--KIV--DRK--R-YTSTKEVL NSTLIHQSITGLYETRIDLGKL-- | 1367 |
| WP_001040089 | 1307 | LAN---NII NLFTFTSLGAP-AAFKFFD--KIV--DRK--R-YTSTKEVL NSTLIHQSITGLYETRIDLGKL-- | 1367 |
| WP_001040090 | 1307 | LAN---NII NLFTFTSLGAP-AAFKFFD--KIV--DRK--R-YTSTKEVL NSTLIHQSITGLYETRIDLGKL-- | 1367 |
| WP_001040091 | 1307 | LAN---NII NLFTFTSLGAP-AAFKFFD--KIV--DRK--R-YTSTKEVL NSTLIHQSITGLYETRIDLGKL-- | 1367 |
| WP_001040092 | 1307 | LAK---NII NLFTFTSLGAP-AAFKFFD--KSV--DRK--R-YTSTKEVL DSTLIHQSITGLYETRIDLGKL-- | 1367 |
| WP_001040094 | 1307 | LAN---NII NLFTFTSLGAP-AAFKFFD--KIV--DRK--R-YTSTKEVL NSTLIHQSITGLYETRIDLGKL-- | 1367 |
| WP_001040095 | 1307 | LAN---NII NLFTFTSLGAP-AAFKFFD--KIV--DRK--R-YTSTKEVL NSTLIHQSITGLYETRIDLGKL-- | 1367 |
| WP_001040096 | 1307 | LAN---NII NLFTFTSLGAP-AAFKFFD--KIV--DRK--R-YTSTKEVL NSTLIHQSITGLYETRIDLGKL-- | 1367 |
| WP_001040097 | 130 | LAN---NII NLFTFTSLGAP-AAFKFFD--KIV--DRK--R-YTSTKEVL NSTLIHQSITGLYETRIDLGKL-- | 1367 |
| WP_001040098 | 1307 | LAN---NII NLFTFTSLGAP-AAFKFFD--KIV--DRK--R-YTSTKEVL NSTLIHQSITGLYETRIDLGKL-- | 1367 |
| WP_001040099 | 1307 | LAN---NII NLFTFTSLGAP-AAFKFFD--KIV--DRK--R-YTSTKEVL NSTLIHKSITGLYETRIDLGKL-- | 1367 |
| WP_001040100 | 1307 | LAN---NII NLFTFTSLGAP-AAFKFFD--KIV--DRK--R-YTSTKEVL NSTLIHQSITGLYETRIDLGKL-- | 1367 |
| WP_001040104 | 1307 | LAN---NII NLFTFTSLGAP-AAFKFFD--KIV--DRK--R-YTSTKEVL NSTLIHQSITGLYETRIDLGKL-- | 1367 |
| WP_001040105 | 1307 | LAN---NII NLFTFTSLGAP-AAFKFFD--KIV--DRK--R-YTSTKEVL NSTLIHQSITGLYETRIDLGKL-- | 1367 |
| WP_001040106 | 1307 | LAN---NII NLFTFTSLGAP-AAFKFFD--KIV--DRK--R-YTSTKEVL NSTLIHQSITGLYETRIDLGKL-- | 1367 |
| WP_001040107 | 1307 | LAN---NII NLFTFTSLGAP-AAFKFFD--KIV--DRK--R-YTSTKEVL NSTLIHQSITGLYETRIDLGKL-- | 1367 |
| WP_001040108 | 1307 | LAN---NII NLFTFTSLGAP-AAFKFFD--KIV--DRK--R-YTSTKEVL NSTLIHQSITGLYETRIDLGKL-- | 1367 |
| WP_001040109 | 1307 | LAN---NII NLFTFTSLGAP-AAFKFFD--KIV--DRK--R-YTSTKEVL NSTLIHQFITGLYETRIDLGKL-- | 1367 |
| WP_001040110 | 1307 | LAN---NII NLFTFTSLGAP-AAFKFFD--KIV--DRK--R-YTSTKEVL NSTLIHQSITGLYETRIDLGKL-- | 1367 |
| WP_015058523 | 1307 | LAK---NII NLFTFTSLGAP-AAFKFFD--KSV--DRK--R-YTSTKEVL DSTLIHQSITGLYETRIDLGKL-- | 1367 |
| WP_017643650 | 1307 | LAN---NII NLFTFTSLGAP-AAFKFFD--KIV--DRK--R-YTSTKEVL NSTLIHQSITGLYETRIDLGKL-- | 1367 |
| WP_017647151 | 1307 | LAN---NII NLFTFTSLGAP-AAFKFFD--KIV--DRK--R-YTSTKEVL NSTLIHQSITGLYETRIDLGKL-- | 1367 |
| WP_017648376 | 1307 | LAN---NII NLFTFTSLGAP-AAFKFFD--KIV--DRK--R-YTSTKEVL NSTLIHQSITGLYETRIDLGKL-- | 1367 |
| WP_017649527 | 1307 | LAN---NII NLFTFTSLGAP-AAFKFFD--KIV--DRK--R-YTSTKEVL NSTLIHQSITGLYETRIDLGKL-- | 1367 |
| WP_017771611 | 1307 | LAN---NII NLFTFTSLGAP-AAFKFFD--KIV--DRK--R-YTSTKEVL NSTLIHQSITGLYETRIDLGKL-- | 1367 |
| WP_017771984 | 1307 | LAN---NII NLFTFTSLGAP-AAFKFFD--KIV--DRK--R-YTSTKEVL NSTLIHQSITGLYETRIDLGKL-- | 1367 |
| CFQ25032 | 1307 | LAN---NII NLFTFTSLGAP-AAFKFFD--KIV--DRK--R-YTSTKEVL NSTLIHQSITGLYETRIDLGKL-- | 1367 |
| CFV16040 | 1307 | LAN---NII NLFTFTSLGAP-AAFKFFD--KIV--DRK--R-YTSTKEVL NSTLIHQSITGLYETRIDLGKL-- | 1367 |
| KLJ37842 | 1307 | LAN---NII NLFTFTSLGAP-AAFKFFD--KIV--DRK--R-YTSTKEVL NSTLIHQSITGLYETRIDLGKL-- | 1367 |
| KLJ72361 | 1307 | LAN---NII NLFTFTSLGAP-AAFKFFD--KIV--DRK--R-YTSTKEVL NSTLIHQSITGLYETRIDLGKL-- | 1367 |
| KLL20707 | 1321 | LAN---NII NLFTFTSLGAP-AAFKFFD--KIV--DRK--R-YTSTKEVL NSTLIHQSITGLYETRIDLGKL-- | 1381 |
| KLL42645 | 1307 | LAN---NII NLFTFTSLGAP-AAFKFFD--KIV--DRK--R-YTSTKEVL NSTLIHQSITGLYETRIDLGKL-- | 1367 |
| WP_047207273 | 1307 | LAN---NII NLFTFTSLGAP-AAFKFFD--KIV--DRK--R-YTSTKEVL NSTLIHQSITGLYETRIDLGKL-- | 1367 |
| WP_047209694 | 1307 | LAN---NII NLFTFTSLGAP-AAFKFFD--KIV--DRK--R-YTSTKEVL NSTLIHKSITGLYETRIDLGKL-- | 1367 |
| WP_050198062 | 1307 | LAN---NII NLFTFTSLGAP-AAFKFFD--KIV--DRK--R-YTSTKEVL NSTLIHQSITGLYETRIDLGKL-- | 1367 |
| WP_050201642 | 1307 | LAN---NII NLFTFTSLGAP-AAFKFFD--KIV--DRK--R-YTSTKEVL NSTLIHQSITGLYETRIDLGKL-- | 1367 |
| WP_050204027 | 1307 | LAN---NII NLFTFTSLGAP-AAFKFFD--KIV--DRK--R-YTSTKEVL NSTLIHQSITGLYETRIDLGKL-- | 1367 |
| WP_050881965 | 1307 | LAN---NII NLFTFTSLGAP-AAFKFFD--KII--DRK--R-YTSTKEVL NSTLIHQSITGLYETRIDLGKL-- | 1367 |
| WP_050886065 | 1307 | LAN---NII NLFTFTSLGAP-AAFKFFD--KIV--DRK--R-YTSTKEVL NSTLIHQSITGLYETRIDLGKL-- | 1367 |
| AHN30376 | 1307 | LAK---NII NLFTFTSLGAP-AAFKFFD--KSV--DRK--R-YTSTKEVL DSTLIHQSITGLYETRIDLGKL-- | 1367 |
| EAO78426 | 1307 | LAN---NII NLFTFTSLGAP-AAFKFFD--KIV--DRK--R-YTSTKEVL NSTLIHQSITGLYETRIDLGKL-- | 1367 |
| CCW42055 | 1307 | LAN---NII NLFTFTSLGAP-AAFKFFD--KIV--DRK--R-YTSTKEVL NSTLIHQSITGLYETRIDLGKL-- | 1367 |
| WP_003041502 | 1314 | ICT---SFL GLFELTSLGSA-SDFEFLG--VKI--PRY--RdYTPSSLLK DSTLIHQSITGLYETRIDLSKL-- | 1383 |
| WP_037593752 | 1283 | LAK---SFI SLLTFTAFGAP-AAFNFFG--ENI--DRK--R-YTSVTECL NATLIHQSITGLYETRIDLSKL-- | 1343 |
| WP_049516684 | 1283 | LAK---SFI SLLTFTAFGAP-AAFNFFG--ENI--DRK--R-YTSVTECL NATLIHQSITGLYETRIDLSKL-- | 1343 |
| GAD46167 | 1282 | LAK---SFI SLLTFTAFGAP-AAFNFFG--ENI--DRK--R-YTSVTECL NATLIHQSITGLYETRIDLSKL-- | 1342 |
| WP_018363470 | 1314 | ISD---SFI NLLTLTALGAP-ADFNFLG--EKI--PRK--R-YNSTKECL NATLIHQSITGLYETRIDLSKL-- | 1374 |
| WP_003043819 | 1311 | -SN---SFV SLLKYTSFGAS-GGFTFLD--LDVkqGRL--R-YQTVTEVL DATLIYQSITGLYETRTDLSQL-- | 1372 |
| WP_006269658 | 1282 | LAK---SFI SLLTFTAFGAP-AAFNFFG--ENI--DRK--R-YTSVTECL NATLIHQSITGLYETRIDLSKL-- | 1342 |
| WP_048800889 | 1302 | ISN---SFI HLLTLTALGAP-ADFNFLG--EKI--PRK--R-YTSTKECL NATLIHQSITGLYETQTDLSKL-- | 1362 |
| WP_012767106 | 1309 | -CS---SVI NLLTLTASGAP-ADFKFLG--TTI--PRK--R-YGSPQSIL SSTLIHQSITGLYETRIDLSQL-- | 1368 |
| WP_014612333 | 1309 | -CS---SVI NLLTLTASGAP-ADFKFLG--TTI--PRK--R-YGSPQSIL SSTLIHQSITGLYETRIDLSQL-- | 1368 |
| WP_015017095 | 1309 | -CS---SVI NLLTLTASGAP-ADFKFLG--TTI--PRK--R-YGSPQSIL SSTLIHQSITGLYETRIDLSQL-- | 1368 |
| WP_015057649 | 1309 | -CS---SVI NLLTLTASGAP-ADFKFLG--TTI--PRK--R-YGSPQSIL SSTLIHQSITGLYETRIDLSQL-- | 1368 |
| WP_048327215 | 1309 | -CS---SVI NLLTLTASGAP-ADFKFLG--TTI--PRK--R-YGSPQSIL SSTLIHQSITGLYETRIDLSQL-- | 1368 |
| WP_049519324 | 1309 | -CS---SVI NLLTLTASGAP-ADFKFLG--TTI--PRK--R-YGSPQSIL SSTLIHQSITGLYETRIDLSQL-- | 1368 |
| WP_012515931 | 1286 | -AE---NII NVFTFVALGAP-AAFKFFD--ATI--DRK--R-YTSTKEVL NATLIHQSVTGLYETRIDLSQL-- | 1345 |
| WP_021320964 | 1286 | -AE---NII NVFTFVALGAP-AAFKFFD--ATI--DRK--R-YTSTKEVL NATLIHQSVTGLYETRIDLSQL-- | 1345 |
| WP_037581760 | 1286 | -AE---NII NVFTFVALGAP-AAFKFFD--ATI--DRK--R-YTSTKEVL NATLIHQSVTGLYETRIDLSQL-- | 1345 |
| WP_004232481 | 1309 | ISSlseSFI NLLKFISFGAP-GAFKFLK--LDV--KQSnlR-YKSTTEAL SATLIHQSVTGLYETRIDLSKI-- | 1374 |
| WP_009854540 | 1307 | ISN---SFI NLLTLTALGAP-ADFNFLG--EKI--PRK--R-YTSTKECL TATLIHQSITGLYETRIDLSKL-- | 1367 |
| WP_012962174 | 1308 | ISI---SFV NLLTLTALGAP-ADFNFLG--EKI--PRK--R-YTSTKECL NATLIHQSITGLYETRIDLSKL-- | 1368 |
| WP_039695303 | 1309 | ISN---SFI NLLTLTALGAP-ADFNFLG--EKI--PRK--R-YTSTKECL NATLIHQSITGLYETRIDLSKL-- | 1369 |
| WP_014334983 | 1312 | ISA---SFI NLLTLTALGAP-ADFNFLG--EKI--PRK--R-YTSTKECL SATLIHQSVTGLYETRIDLSKL-- | 1372 |
| WP_003099269 | 1306 | -AI---NML NLFTFTDLGAP-SAFKFFN--GDI--DRK--R-YSSTNEII NSTLIYQSPTGLYETRIDLSKL-- | 1365 |
| AHY15608 | | --------- ----------------------------------------- ------------------------ | |
| AHY17476 | | --------- ----------------------------------------- ------------------------ | |
| ESR09100 | 138 | -AI---NML NLFTFTDLGAP-SAFKFFNg--DI--DRK--R-YSSTNEII NSTLIYQSPTGLYETRIDLSKL-- | 197 |
| AGM98575 | | --------- ----------------------------------------- ------------------------ | |
| ALF27331 | 1282 | LAS---SFI NLLTFTAIGAP-AAFKFFD--NNI--DRK--R-YTSTTEIL NATLIHQSITGLYETRIDLSRL-- | 1342 |
| WP_018372492 | 1290 | VAR---SFV -LLNFTMMGAA-TDFKFFG--QII--PRK--R-YPSTTECL KSTLIHQSVTGLYETRIDLSKL-- | 1350 |
| WP_045618028 | 1311 | LSE---SFI SLLKLISFGAP-GTFKFLG--VEI--SQSnvR-YQSVSSCF NATLIHQSITGLYETRIDLSKL-- | 1373 |
| WP_045635197 | 1307 | LAN---SFI NLLTFTALGAP-AAFKFFG--KDI--DRK--R-YTTVSEIL NATLIHQSITGLYETWIDLSKL-- | 1367 |
| WP_002263549 | 1282 | LAS---SFI NLLTFTAIGAP-ATFKFFD--KNI--DRK--R-YTSTTEIL NATLIHQSITGLYETRIDLNKL-- | 1342 |
| WP_002263887 | 1282 | LAS---SFI NLLTFTAIGAP-ATFKFFD--KNI--DRK--R-YTSTTEIL NATLIHQSITGLYETRIDLNKL-- | 1342 |
| WP_002264920 | 1282 | LAS---SFI NLLTFTAIGAP-ATFKFFD--KNI--DRK--R-YTSTTEIL NATLIHQSITGLYETRIDLSKL-- | 1342 |
| WP_002269043 | 1282 | LAS---SFI NLLTFTAIGAP-ATFKFFD--KNI--DRK--R-YTSTTEIL NATLIHQSITGLYETRIDLNKL-- | 1342 |
| WP_002269448 | 1282 | LAS---SFI NLLTFTAIGAP-ATFKFFD--KNI--DRK--R-YTSTTEIL NATLIHQSITGLYETRIDLSKL-- | 1342 |
| WP_002271977 | 1282 | LAS---SFI NLLTFTAIGAP-ATFKFFD--KNI--DRK--R-YTSTTEIL NATLIHQSITGLYETRIDLSKL-- | 1342 |
| WP_002272766 | 1282 | LAS---SFI NLLTFTAIGAP-ATFKFFD--KNI--DRK--R-YTSTTEIL NATLIHQSITGLYETRIDLSKL-- | 1342 |
| WP_002273241 | 1282 | LAS---SFI NLLTFTAIGAP-ATFKFFD--KNI--DRK--R-YTSTTEIL NATLIHQSITGLYETRIDLSKL-- | 1342 |
| WP_002275430 | 1282 | LSS---SFI NLLTFTAIGAP-AAFKFFD--KNI--DRK--R-YTSTTEIL NATLIHQSITGLYETRIDLSKL-- | 1342 |
| WP_002276448 | 1282 | LAS---SFI NLLTFTAIGAP-ATFKFFD--KNI--DRK--R-YTSTTEIL NATLIHQSITGLYETRIDLSKL-- | 1342 |
| WP_002277050 | 1288 | LAD---GFI KLLGFTQLGAT-SPFSFLG--IKL--NQK--Q-YTGKKDYL EATLIHQSITGLYETRIDLNKL-- | 1352 |
| WP_002277364 | 1282 | LAS---SFI NLLTFTAIGAP-ATFKFFD--KNI--DRK--R-YTSTTEIL NATLIHQSITGLYETRIDLSKL-- | 1342 |
| WP_002279025 | 1282 | LAS---SFI NLLTFTAIGAP-ATFKFFD--KNI--DRK--R-YTSTTEIL NATLIHQSITGLYETRIDLSKL-- | 1342 |
| WP_002279859 | 1282 | LAS---SFI NLLTFTAIGAP-ATFKFFD--KNI--DRK--R-YTSTTEIL NATLIHQSITGLYETRIDLSKL-- | 1342 |
| WP_002280230 | 1282 | LAS---SFI NLLTFTAIGAP-ATFKFFD--KNI--DRK--R-YTSTTEIL NATLIHQSITGLYETRIDLSKL-- | 1342 |
| WP_002281696 | 1282 | LSS---SFI NLLTFTAIGAP-AAFKFFD--KNI--DRK--R-YTSTTEIL NATLIHQSITGLYETRIDLSKL-- | 1342 |
| WP_002282247 | 1288 | LAD---GFI KLLGFTQLGAT-SPFSFLG--IKL--NQK--Q-YTGKKDYL EATLIHQSITGLYETRIDLSKL-- | 1352 |
| WP_002282906 | 1282 | LAS---SFI NLLTFTAIGAP-ATFKFFD--KNI--DRK--R-YTSTTEIL NATLIHQSITGLYETRIDLSKL-- | 1342 |
| WP_002283846 | 1282 | LAS---SFI NLLTFTAIGAP-ATFKFFD--KNI--DRK--R-YTSTTEIL NATLIHQSITGLYETRIDLSKL-- | 1342 |
| WP_002287255 | 1282 | LAS---SFI NLLTFTAIGAP-ATFKFFD--KNI--DRK--R-YTSTTEIL NATLIHQSITGLYETRIDLSKL-- | 1342 |
| WP_002288990 | 1282 | LAS---SFI NLLTFTAIGAP-AAFKFFD--KNI--DRK--R-YTSTTEIL NATLIHQSITGLYETRIDLSKL-- | 1342 |
| WP_002289641 | 1282 | LAS---SFI NLLTFTAIGAP-ATFKFFD--KNI--DRK--R-YTSTTEIL NATLIHQSITGLYETRIDLSKL-- | 1342 |
| WP_002290427 | 1282 | LAS---SFI NLLTFTAIGAP-ATFKFFD--KNI--DRK--R-YTSTTEIL NATLIHQSITGLYETRIDLSKL-- | 1342 |
| WP_002295753 | 1282 | LAS---SFI NLLTFTAIGAP-AAFKFFD--KNI--DRK--R-YTSTTEIL NATLIHQSITGLYETRIDLSKL-- | 1342 |
| WP_002296423 | 1282 | LAS---SFI NLLTFTAIGAP-ATFKFFD--KNI--DRK--R-YTSTTEIL NATLIHQSITGLYETRIDLSKL-- | 1342 |
| WP_002304487 | 1296 | LAS---SFI NLLTFTAIGAP-AAFKFFD--KNI--DRK--R-YTSTTEIL NATLIHQSITGLYETRIDLNKL-- | 1356 |
| WP_002305844 | 1282 | LAS---SFI NLLTFTAIGAP-ATFKFFD--KNI--DRK--R-YTSTTEIL NATLIHQSITGLYETRIDLSKL-- | 1342 |
| WP_002307203 | 1282 | LAS---SFI NLLTFTAIGAP-ATFKFFD--KNI--DRK--R-YTSTTEIL NATLIHQSITGLYETRIDLSKL-- | 1342 |
| WP_002310390 | 1282 | LAS---SFI NLLTFTAIGAP-ATFKFFD--KNI--DRK--R-YTSTTEIL NATLIHQSITGLYETRIDLSKL-- | 1342 |
| WP_002352408 | 1282 | LAS---SFI NLLTFTAIGAP-ATFKFFD--KNI--DRK--R-YTSTTEIL NATLIHQSITGLYETRIDLSKL-- | 1342 |
| WP_012997688 | 1282 | LAS---SFI NLLTFTAIGAP-ATFKFFD--KNI--DRK--R-YTSTTEIL NATLIHQSITGLYETRIDLSKL-- | 1342 |
| WP_014677909 | 1282 | LAS---SFI NLLTFTAIGAP-ATFKFFD--KNI--DRK--R-YTSTTEIL NATLIHQSITGLYETRIDLSKL-- | 1342 |
| WP_019312892 | 1282 | LAS---SFI NLLTFTAIGAP-ATFKFFD--KNI--DRK--R-YTSTTEIL NATLIHQSITGLYETRIDLSKL-- | 1342 |
| WP_019313659 | 1282 | LAS---SFI NLLTFTAIGAP-ATFKFFD--KNI--DRK--R-YTSTTEIL NATLIHQSITGLYETRIDLNKL-- | 1342 |
| WP_019314093 | 1282 | LAS---SFI NLLTFTAIGAP-AAFKFFD--KNI--DRK--R-YTSTTEIL NATLIHQSITGLYETRIDLSKL-- | 1342 |
| WP_019315370 | 1282 | LSS---SFI NLLTFTAIGAP-AAFKFFD--KNI--DRK--R-YTSTTEIL NATLIHQSITGLYETRIDLSKL-- | 1342 |
| WP_019803776 | 1282 | LAS---SFI NLLTFTAIGAP-ATFKFFD--KNI--DRK--R-YTSTTEIL NATLIHQSITGLYETRIDLNKL-- | 1342 |
| WP_019805234 | 1282 | LAS---SFI NLLTFTAIGAP-ATFKFFD--KNI--DRK--R-YTSTTEIL NATLIHQSITGLYETRIDLSKL-- | 1342 |
| WP_024783594 | 1282 | LAS---SFI NLLTFTAIGAP-ATFKFFD--KNI--DRK--R-YTSTTEIL NATLIHQSITGLYETRIDLNKL-- | 1342 |
| WP_024784288 | 1288 | LAD---GFI KLLGFTQLGAT-SPFSFLG--IKL--NQK--Q-YTGKKDYL EATLIHQSITGLYETRIDLSKL-- | 1352 |
| WP_024784666 | 1282 | LAS---SFI NLLTFTAIGAP-ATFKFFD--KNI--DRK--R-YTSTTEIL NATLIHQSITGLYETRIDLSKL-- | 1342 |
| WP_024784894 | 1282 | LAS---SFI NLLTFTAIGAP-ATFKFFD--KNI--DRK--R-YTSTTEIL NATLIHQSITGLYETRIDLSKL-- | 1342 |
| WP_024786433 | 1288 | LAD---GFI KLLGFTQLGAT-SPFSFLG--IKL--NQK--Q-YTGKKDYL EATLIHQSITGLYETRIDLSKL-- | 1352 |
| WP_049473442 | 1282 | LAS---SFI NLLTFTAIGAP-ATFKFFD--KNI--DRK--R-YTSTTEIL NATLIHQSITGLYETRIDLSKL-- | 1342 |
| WP_049474547 | 1282 | LAS---SFI NLLTFTAIGAP-ATFKFFD--KNI--DRK--R-YTSTTEIL KATLIHQSITGLYETRIDLSKL-- | 1342 |
| EMC03581 | 1275 | LAS---SFI NLLTFTAIGAP-ATFKFFD--KNI--DRK--R-YTSTTEIL NATLIHQSITGLYETRIDLSKL-- | 1335 |
| WP_000428612 | 1310 | LAN---SFI NLLTFTALGAP-AAFKFFG--KDV--DRK--R-YTTVSEIL NATLIHQSITGLYETRIDLSKL-- | 1370 |
| WP_000428613 | 1308 | LAN---SFI NLLTFTALGAP-AAFKFFG--KDI--DRK--R-YTTVSEIL NATLIHQSITGLYETRIDLSKL-- | 1368 |
| WP_049523028 | 1303 | IAN---SFI NLLTFTAFGAP-AVFKFFG--KDI--ERK--R-YSTVTEIL KATLIHQSLTGLYETRIDLSKL-- | 1363 |
| WP_003107102 | 1275 | -AT---NML NLFTFTGLGAP-ATLKFFN--VDI--DRK--R-YTSSTEIL NSTLIRQSITGLYETRIDLSKI-- | 1334 |
| WP_054279288 | 1304 | -SI---SFL NLFKFTSFGAP-EKFTFLN--SEIkqDDV--R-YRSTKECL NSTLIHQSVTGLYETRIDLSQF-- | 1365 |
| WP_049531101 | 1311 | LSE---SFI SLLKLTSFGAP-GAFRFLG--VEI--SQSnvR-YQSVSSCF NATLIHQSITGLYETRIDLSKL-- | 1373 |
| WP_049538452 | 1311 | LSE---SFI SLLKLTSFGAP-GAFKFLG--VEI--SQSsvR-YKPNSQFL DATLIHQSITGLYETRIDLSKL-- | 1373 |
| WP_049549711 | 1313 | LSE---SFI SLLKLTSFGAP-GAFKFLG--AEI--SQSsvR-YKPNSQFL DTTLIHQSITGLYETRIDLSKL-- | 1375 |
| WP_007896501 | 1312 | -AL---NML NLFIFTSLGAP-STFVFFD--ETI--DRK--R-YTTSSDVL NGILIQQSITGLYETRIDLSRF-- | 1371 |
| EFR44625 | 1264 | -AL---NML NLFIFTSLGAP-STFVFFD--ETI--DRK--R-YTTSSDVL NGILIQQSITGLYETRIDLSRF-- | 1323 |
| WP_002897477 | 1307 | LAN---SFI NLLTFTALGAP-AAFKFFG--KDV--DRK--R-YTTVSEIL NATLIHQSITGLYETRIDLSKL-- | 1367 |
| WP_002906454 | 1312 | LSE---SFI SLLKLTSFGAP-GAFKFLG--VEI--SQSsvR-YKPNSQFL DTTLIHQSITGLYETRIDLSKL-- | 1374 |
| WP_009729476 | 1308 | LAN---SFI NLLTFTALGAP-AAFKFFG--KDV--DRK--R-YTTVSEIL NATLIHQSITGLYETRIDLSKL-- | 1368 |
| CQR24647 | 1296 | LAQ---SFI SLLKFTAFGAP-GGFKFLD--ADI--KQSn1R-YQTVTEVL SSTLIHQSVTGLYETRIDLSKL-- | 1358 |
| WP_000066813 | 1312 | LAN---SFI NLLTFTALGAP-AAFKFLG--KDV--DRK--R-YTTVSEIL NATLIHQSITGLYETRIDLSKL-- | 1372 |
| WP_009754323 | 1308 | LAN---SFI NLLTFTALGAP-AAFKFFG--KDV--DRK--R-YTTVSEIL NATLIHQSITGLYETRIDLSKL-- | 1368 |
| WP_044674937 | 1301 | LTS---SFV NLLTFTAIGAP-AAFKFLG--SVI--DRK--R-YTSIAEIL EATLIHQSVTGLYETRIDLSKL-- | 1361 |
| WP_044676715 | 1303 | LTS---SFV NLLTFTAIGAP-AAFKFLG--SVI--DRK--R-YTSIAEIL EATLIHQSVTGLYETRIDLSKL-- | 1363 |
| WP_044680361 | 1303 | LTS---SFV NLLTFTAIGAP-AAFKFLG--SVI--DRK--R-YTSIAEIL EATLIHQSVTGLYETRIDLSKL-- | 1363 |
| WP_044681799 | 1301 | LTS---SFV NLLTFTAIGAP-AAFKFLG--SVI--DRK--R-YTSIAEIL EATLIHQSVTGLYETRIDLSKL-- | 1361 |
| WP_049533112 | 1314 | ICT---SFL GLFELTSLGSA-SDFEFLG--VKI--PRY--RdYTPSSLLK DSTLIHQSITGLYETRIDLSKL-- | 1383 |
| WP_029090905 | 1241 | -VK----VI ELLKITQANATnGDLKLLK----M-sNREg-R-LGSVSVAL DFKI-INQSVTGLYQSIEDYNN-- | 1300 |
| WP_006506696 | 1269 | -AN----II QMLIVMHRGPQnGNIVYDDf--KI-sDRIg-R-LKTKNHNL NIVFISQSPTGIYTKKYKL----- | 1329 |
| AIT42264 | 1306 | -AE---NII HLFTLTNLGAP-AAFKYFD--TTI--DRK--R-YTSTKEVL DATLIHQSITGLYETRIDLSQL-- | 1365 |
| WP_034440723 | 1277 | LVE---SFI NLLAITKCGPA-ADITFLG--EKI--SRK--R-YRSINCLW GSEVIFQSPTGLYETRLRLE---- | 1335 |
| AKQ21048 | 1306 | -AE---NII HLFTLTNLGAP-AAFKYFD--TTI--DRK--R-YTSTKEVL DATLIHQSITGLYETRIDLSQL-- | 1365 |
| WP_004636532 | 1272 | TVE---SFV NLMTFTAMGAP-ATFKFYG--ESI--TRS--R-YTSITEFR GSTLIFQSITGLYETRYKL----- | 1329 |
| WP_002364836 | 1278 | IAA---SFI QLMQFNAMGAP-STFKFFQ--KDI--ERA--R-YTSIKEIF DATIIYQSTTGLYETRRKV----- | 1335 |
| WP_016631044 | 1229 | IAA---SFI QLMQFNAMGAP-STFKFFQ--KDI--ERA--R-YTSIKEIF DATIIYQSPTGLYETRRKV----- | 1286 |
| EMS75795 | 1014 | LSQ---SFI NLMQLNAMGAP-ADFKFFD--VII--PRK--R-YPSLTEIW ESTIIYQSITGLRETRTRMATLwd | 1076 |
| WP_002373311 | 1278 | IAA---SFI QLMQFNAMGAP-STFKFFQ--KDI--ERA--R-YTSIKEIF DATIIYQSTTGLYETRRKV----- | 1335 |
| WP_002378009 | 1278 | IAA---SFI QLMQFNAMGAP-STFKFFQ--KDI--ERA--R-YTSIKEIF DATIIYQSTTGLYETRRKV----- | 1335 |
| WP_002407324 | 1278 | IAA---SFI QLMQFNAMGAP-STFKFFQ--KDI--ERA--R-YTSIKEIF DATIIYQSTTGLYETRRKV----- | 1335 |
| WP_002413717 | 1278 | IAA---SFI QLMQFNAMGAP-STFKFFQ--KDI--ERA--R-YTSIKEIF DATIIYQSTTGLYETRRKV----- | 1335 |
| WP_010775580 | 1280 | IAA---SFI QLMQFNAMGAP-STFKFFQ--KDI--ERA--R-YTSIKEIF DATIIYQSTTGLYETRRKV----- | 1337 |
| WP_010818269 | 1278 | IAA---SFI QLMQFNAMGAP-STFKFFQ--KDI--ERA--R-YTSIKEIF DATIIYQSTTGLYETRRKV----- | 1335 |
| WP_010824395 | 1278 | IAA---SFI QLMQFNAMGAP-STFKFFQ--KDI--ERA--R-YTSIKEIF DATIIYQSTTGLYETRRKV----- | 1335 |
| WP_016622645 | 1278 | IAA---SFI QLMQFNAMGAP-STFKFFQ--KDI--ERA--R-YTSIKEIF DATIIYQSTTGLYETRRKV----- | 1335 |
| WP_033624816 | 1278 | IAA---SFI QLMQFNAMGAP-STFKFFQ--KDI--ERA--R-YTSIKEIF DATIIYQSTTGLYETRRKV----- | 1335 |
| WP_033625576 | 1278 | IAA---SFI QLMQFNAMGAP-STFKFFQ--KDI--ERA--R-YTSIKEIF DATIIYQSTTGLYETRRKV----- | 1335 |
| WP_033789179 | 1278 | IAA---SFI QLMQFNAMGAP-STFKFFQ--KDI--ERA--R-YTSIKEIF DATIIYQSTTGLYETRRKV----- | 1335 |
| WP_002310644 | 1280 | LAS---SFV NLMQFNAMGAP-ADFKFFD--VTI--PRK--R-YTSLTEIW QSTIIHQSITGLYETRIRMGK--- | 1339 |
| WP_002312694 | 1281 | LAS---SFV NLMQFNAMGAP-ADFKFFD--VTI--PRK--R-YTSLTEIW QSTIIHQSITGLYETRIRMGK--- | 1340 |
| WP_002314015 | 1281 | LAS---SFV NLMQFNAMGAP-ADFKFFD--VTI--PRK--R-YTSLTEIW QSTIIHQSITGLYETRIRMGK--- | 1340 |
| WP_002320716 | 1281 | LAS---SFV NLMQFNAMGAP-ADFKFFD--VTI--PRK--R-YTSLTEIW QSTIIHQSITGLYETRIRMGK--- | 1340 |
| WP_002330729 | 1280 | LAS---SFV NLMQFNAMGAP-ADFKFFD--VTI--PRK--R-YTSLTEIW QSTIIHQSITGLYETRIRMGK--- | 1339 |
| WP_002335161 | 1281 | LAS---SFV NLMQFNAMGAP-ADFKFFD--VTI--PRK--R-YTSLTEIW QSTIIHQSITGLYETRIRMGK--- | 1340 |
| WP_002345439 | 1281 | LAS---SFV NLMQFNAMGAP-ADFKFFD--VTI--PRK--R-YTSLTEIW QSTIIHQSITGLYETRIRMGK--- | 1340 |
| WP_034867970 | 1271 | IAQ---SFL QLLQFNAIGAP-ADFKFFG--VTI--PRK--R-YTSLTEIW DATIIYQSVTGLYETRIRMGDLwa | 1333 |
| WP_047937432 | 1281 | LAS---SFV NLMQFNAMGAP-ADFKFFD--VTI--PRK--R-YTSLTEIW QSTIIHQSITGLYETRIRMGK--- | 1340 |
| WP_010720994 | 1271 | IAQ---SFL QLLOFNAIGAP-ADFKFFG--VTI--PRK--R-YTSLTEIW DATIIYQSVTGLYETRIRMGDLwa | 1333 |
| WP_010737004 | 1271 | IAQ---SFL QLLQFNAIGAP-ADFKFFG--VTI--PRK--R-YTSLTEIW DATIIYQSVTGLYETRIRMGDLwa | 1333 |
| WP_034700478 | 1271 | IAQ---SFL QLLQFNAIGAP-ADFKFFG--VTI--PRK--R-YTSLTEIW DATIIYQSVTGLYETRIRMGDLwa | 1333 |
| WP_007209003 | 1270 | IAK---SFI NLLTFTAMGAP-ADFEFFG--EKI--PRK--R-YVSISEII DAVFIHQSITGLYETRVRLTEV-- | 1330 |
| WP_023519017 | 1265 | MID---AIL SLLKFTLFGAS-VEFKFFD--IKI---LK--R-YKSLTDIW EATIIYQSVTGLYERRVEVRKLwd | 1326 |
| WP_010770040 | 1275 | IAE---SFV NLMKFSAYGAP-MDFKFFG--KTI--PRS--R-YTSVGELL SATIINQSITGLYETRRKL----- | 1332 |
| WP_048604708 | 1271 | IAQ---SFV DLMQLNAFGAP-ADFKFFG--ETI--PRK--R-YTSVNELL EATIINQSITGLYETRRRL----- | 1328 |
| WP_010750235 | 1274 | MAH---SFV NLMQFNALGAP-ADFKFFD--TTI--TRK--R-YTSLTEIW QSTIIYQSVTGLYETRRRMADLwd | 1336 |
| AII16583 | 1345 | -AE---NII HLFTLTNLGAP-AAFKYFD--TTI--DRK--R-YTSTKEVL DATLIHQSITGLYETRIDLSQL-- | 1404 |
| WP_029073316 | 1283 | -CE----VI QMLVVMHAGPQnGNITFDDf--KL-sNRLg-R-LNCKTISL TTVFIADSPTGMYSKKYKL----- | 1343 |
| WP_031589969 | 1284 | -CN----II QILATLHCNSSIGKIMYSDf--KI-sTTIg-R-LNGRTISL DISFIAESPTGMYSKKYKL----- | 1344 |
| KDA45870 | 1254 | LGK---NFV ELLRYTADGAA-SDFKFFG--ENI--PRK--R-YNSAGSLL NGTLIYQSKTGLYETRIDLGKL-- | 1314 |
| WP_039099354 | 1307 | ILDr----V -LIGLHANAAV-SDLGVLKisTPL--GKM--Q---QPSGIS DTQIIYQSPTGLFERRVALRDL-- | 1368 |
| AKP02966 | 1297 | INS1-eELI TLLHANSTSAH-LIFNNIE-KKAF--GRK-------THGLT DTDFIYQSVTGLYETRIHIE---- | 1356 |
| WP_010991369 | 1275 | IAQ---SFV DLMAFNAMGAP-ASFKFFE--TTI--ERK--R-YNNLKELL NSTIIYQSITGLYESRKRL----- | 1332 |
| WP_033838504 | 1275 | IAQ---SFV DLMAFNAMGAP-ASFKFFE--TTI--ERK--R-YNNLKELL NSTIIYQSITGLYESRKRL----- | 1332 |
| EHN60060 | 1278 | IAQ---SFV DLMAFNAMGAP-ASFKFFE--TTI--ERK--R-YNNLKELL NSTIIYQSITGLYESRKRL----- | 1335 |
| EFR89594 | 1044 | IAQ---SFV DLMAFNAMGAP-ASFKFFE--TTI--ERK--R-YNNLKELL NSTIIYQSITGLYESRKRL----- | 1101 |
| WP_038409211 | 1275 | IAK---SFD KLKVFNAFGAP-RDFEFFE--TTI--KRK--R-YYNIKELL NATIIYQSITGLYEARKRL----- | 1332 |
| EFR95520 | 894 | IAK---SFD KLKVFNAFGAP-RDFEFFE--TTI--KRK--R-YYNIKELL NATIIYQSITGLYEARKRL----- | 951 |
| WP_003723650 | 1275 | IAQ---SFV DLMAFNAMGAP-ASFKFFE--ATI--DRK--R-YTNLKELL SSTIIYQSITGLYESRKRL----- | 1332 |
| WP_003727705 | 1275 | IAQ---SFV DLMAFNAMGAP-ASFKFFE--ATI--DRK--R-YTNLKELL SSTIIYQSITGLYESRKRL----- | 1332 |
| WP_003730785 | 1275 | IAQ---SFV DLMAFNAMGAP-ASFKFFE--ATI--DRK--R-YTNLKELL SSTIIYQSITGLYESRKRL----- | 1332 |
| WP_003733029 | 1275 | IAE---SFV SLKKFNAFGVH-QDFSFFG--TKI--ERK--R-DRKLNELL NSTIIYQSITGLYESRKRL----- | 1332 |
| WP_003739838 | 1275 | IAQ---SFV NLMAFNAMGAP-ASFKFFE--ATI--ERK--R-YTNLKELL SATIIYQSITGLYEARKRI----- | 1332 |
| WP_014601172 | 1275 | IAQ---SFV DLMAFNAMGAP-ASFKFFE--ATI--DRK--R-YTNLKELL SSTIIYQSITGLYESRKRL----- | 1332 |
| WP_023548323 | 1275 | IAE---SFV SLKKFNAFGVH-KDFNFFG--TTI--KRK--R-DRKLKELL NSTIIYQSITGLYESRKRL----- | 1332 |
| WP_031665337 | 1275 | IAQ---SFV DLMAFNAMGAP-ASFKFFE--ATI--DRK--R-YTNLKELL SSTIIYQSITGLYESRKRI----- | 1332 |
| WP_031669209 | 1275 | IAE---SFV SLKKFNAFGVH-QDFSFFG--TKI--ERK--R-DRKLNELL NSTIIYQSITGLYESRKRL----- | 1332 |
| WP_033920898 | 1275 | IAE---SFV SLKKFNAFGVH-KDFNFFG--TTI--KRK--R-DRKLKELL NSTIIYQSITGLYESRKRL----- | 1332 |
| AKI42028 | 1278 | IAQ---SFV DLMAFNAMGAP-ASFKFFE--ATI--DRK--R-YTNLKELL SSTIIYQSITGLYESRKRL----- | 1335 |
| AKI50529 | 1278 | IAE---SFV SLKKFNAFGVH-KDFNFFG--TTI--KRK--R-DRKLKELL NSTIIYQSITGLYESRKRI----- | 1335 |
| EFR83390 | 723 | IAQ---SFV DLMVFNAMGAP-ASFKFFE--ATI--DRK--R-YTNLKELL SSTIIYQSITGLYESRKRL----- | 780 |
| WP_046323366 | 1275 | IAQ---SFV NLLEFNAMGAP-ASFKYFE--TNI--ERK--R-YNNLKELL NATIIYQSITGLYEARKRL----- | 1332 |
| AKE81011 | 1322 | -AE---NII HLFTLTNLGAP-AAFKYFD--TTI--DRK--R-YTSTKEVL DATLIHQSITGLYETRIDLSQL-- | 1381 |
| CUO82355 | 1273 | -AN----VI QMLIIMHKGPQnGNIIYDDf--NV-gKRIg-R-LNGRTFYL NIEFISQSPTGIYTKKYKL----- | 1333 |
| WP_033162887 | 1275 | -CD----VI QILIIMHAGPMnGNIMYDDf--KF-tNRIg-R-FTHKNIDL KTTFISTSVTGLFSKKYKL----- | 1335 |
| AGZ01981 | 1339 | -AE---NII HLFTLTNLGAP-AAFKYFD--TTI--DRK--R-YTSTKEVL DATLIHQSITGLYETRIDLSQL-- | 1398 |
| AKA60242 | 1306 | -AE---NII HLFTLTNLGAP-AAFKYFD--TTI--DRK--R-YTSTKEVL DATLIHQSITGLYETRIDLSQL-- | 1365 |
| AKS40380 | 1306 | -AE---NII HLFTLTNLGAP-AAFKYFD--TTI--DRK--R-YTSTKEVL DATLIHQSITGLYETRIDLSQL-- | 1365 |
| 4UN5_B | 1310 | -AE---NII HLFTLTNLGAP-AAFKYFD--TTI--DRK--R-YTSTKEVL DATLIHQSITGLYETRIDLSQL-- | 1369 |
| WP_010922251 | 1366 | GGD | 1368 |
| WP_039695303 | 1370 | GEE | 1372 |
| WP_045635197 | 1368 | GED | 1370 |
| 5AXW_A | | --- | |
| WP_009880683 | 1050 | GGD | 1052 |
| WP_010922251 | 1366 | GGD | 1368 |
| WP_011054416 | 1366 | GGD | 1368 |
| WP_011284745 | 1366 | GGD | 1368 |
| WP_011285506 | 1366 | GGD | 1368 |
| WP_011527619 | 1366 | GGD | 1368 |
| WP_012560673 | 1366 | GGD | 1368 |
| WP_014407541 | 1365 | GGD | 1367 |
| WP_020905136 | 1366 | GGD | 1368 |
| WP_023080005 | 1365 | GGD | 1367 |
| WP_023610282 | 1365 | GGD | 1367 |
| WP_030125963 | 1366 | GGD | 1368 |
| WP_030126706 | 1366 | GGD | 1368 |
| WP_031488318 | 1366 | GGD | 1368 |
| WP_032460140 | 1366 | GGD | 1368 |
| WP_032461047 | 1366 | GGD | 1368 |
| WP_032462016 | 1366 | GGD | 1368 |
| WP_032462936 | 1366 | GGD | 1368 |
| WP_032464890 | 1366 | GGD | 1368 |
| WP_033888930 | 1191 | GGD | 1193 |
| WP_038431314 | 1366 | GGD | 1368 |
| WP_038432938 | 1365 | GGD | 1367 |
| WP_038434062 | 1366 | GGD | 1368 |
| BAQ51233 | 1277 | GGD | 1279 |
| KGE60162 | 541 | GGD | 543 |
| KGE60856 | 304 | GGD | 306 |
| WP_002989955 | 1366 | GGD | 1368 |
| WP_003030002 | 1343 | GED | 1345 |
| WP_003065552 | 1371 | GEE | 1373 |
| WP_001040076 | 1368 | GED | 1370 |
| WP_001040078 | 1376 | GED | 1378 |
| WP_001040080 | 1368 | GED | 1370 |
| WP_001040081 | 1368 | GED | 1370 |
| WP_001040083 | 1368 | GED | 1370 |
| WP_001040085 | 1368 | GED | 1370 |
| WP_001040087 | 1368 | GED | 1370 |
| WP_001040088 | 1368 | GGD | 1370 |
| WP_001040089 | 1368 | GED | 1370 |
| WP_001040090 | 1368 | GED | 1370 |
| WP_001040091 | 1368 | GED | 1370 |
| WP_001040092 | 1368 | GED | 1370 |
| WP_001040094 | 1368 | GED | 1370 |
| WP_001040095 | 1368 | GEG | 1370 |
| WP_001040096 | 1368 | GEG | 1370 |
| WP_001040097 | 1368 | GED | 1370 |
| WP_001040098 | 1368 | GED | 1370 |
| WP_001040099 | 1368 | GED | 1370 |
| WP_001040100 | 1368 | GED | 1370 |
| WP_001040104 | 1368 | GED | 1370 |
| WP_001040105 | 1368 | GED | 1370 |
| WP_001040106 | 1368 | GED | 1370 |
| WP_001040107 | 1368 | GED | 1370 |
| WP_001040108 | 1368 | GED | 1370 |
| WP_001040109 | 1368 | GED | 1370 |
| WP_001040110 | 1368 | GED | 1370 |
| WP_015058523 | 1368 | GED | 1370 |
| WP_017643650 | 1368 | GED | 1370 |
| WP_017647151 | 1368 | GED | 1370 |
| WP_017648376 | 1368 | GED | 1370 |
| WP_017649527 | 1368 | GED | 1370 |
| WP_017771611 | 1368 | GED | 1370 |
| WP_017771984 | 1368 | GED | 1370 |
| CFQ25032 | 1368 | GED | 1370 |
| CFV16040 | 1368 | GED | 1370 |
| KLJ37842 | 1368 | GED | 1370 |
| KLJ72361 | 1368 | GGD | 1370 |
| KLL20707 | 1382 | GED | 1384 |
| KLL42645 | 1368 | GED | 1370 |
| WP_047207273 | 1368 | GED | 1370 |
| WP_047209694 | 1368 | GED | 1370 |
| WP_050198062 | 1368 | GED | 1370 |
| WP_050201642 | 1368 | GED | 1370 |
| WP_050204027 | 1368 | GED | 1370 |
| WP_050881965 | 1368 | GED | 1370 |
| WP_050886065 | 1368 | GED | 1370 |
| AHN30376 | 1368 | GED | 1370 |
| EAO78426 | 1368 | GED | 1370 |
| CCW42055 | 1368 | GED | 1370 |
| WP_003041502 | 1384 | GED | 1386 |
| WP_037593752 | 1344 | GED | 1346 |
| WP_049516684 | 1344 | GED | 1346 |
| GAD46167 | 1343 | GED | 1345 |
| WP_018363470 | 1375 | GEE | 1377 |
| WP_003043819 | 1373 | GGD | 1375 |
| WP_006269658 | 1343 | GED | 1345 |
| WP_048800889 | 1363 | GED | 1365 |
| WP_012767106 | 1369 | GGD | 1371 |
| WP_014612333 | 1369 | GGD | 1371 |
| WP_015017095 | 1369 | GGD | 1371 |
| WP_015057649 | 1369 | GGD | 1371 |
| WP_048327215 | 1369 | GGD | 1371 |
| WP_049519324 | 1369 | GGD | 1371 |
| WP_012515931 | 1346 | GEN | 1348 |
| WP_021320964 | 1346 | GEN | 1348 |
| WP_037581760 | 1346 | GEN | 1348 |
| WP_004232481 | 1375 | GEE | 1377 |
| WP_009854540 | 1368 | GEE | 1370 |
| WP_012962174 | 1369 | GEE | 1371 |
| WP_039695303 | 1370 | GEE | 1372 |
| WP_014334983 | 1373 | GEE | 1375 |
| WP_003099269 | 1366 | GGK | 1368 |
| AHY15608 | | --- | |
| AHY17476 | | --- | |
| ESR09100 | 198 | GGK | 200 |
| AGM98575 | | --- | |
| ALF27331 | 1343 | GGD | 1345 |
| WP_018372492 | 1351 | GEN | 1353 |
| WP_045618028 | 1374 | GED | 1376 |
| WP_045635197 | 1368 | GED | 1370 |
| WP_002263549 | 1343 | GGD | 1345 |
| WP_002263887 | 1343 | GGD | 1345 |
| WP_002264920 | 1343 | GGD | 1345 |
| WP_002269043 | 1343 | GGD | 1345 |
| WP_002269448 | 1343 | GGD | 1345 |
| WP_002271977 | 1343 | GGD | 1345 |
| WP_002272766 | 1343 | GGD | 1345 |
| WP_002273241 | 1343 | GGD | 1345 |
| WP_002275430 | 1343 | GGD | 1345 |
| WP_002276448 | 1343 | GGD | 1345 |
| WP_002277050 | 1353 | GGD | 1355 |
| WP_002277364 | 1343 | GGD | 1345 |
| WP_002279025 | 1343 | GGD | 1345 |
| WP_002279859 | 1343 | GGD | 1345 |
| WP_002280230 | 1343 | GGD | 1345 |
| WP_002281696 | 1343 | GGD | 1345 |
| WP_002282247 | 1353 | GGD | 1355 |
| WP_002282906 | 1343 | GGD | 1345 |
| WP_002283846 | 1343 | GGD | 1345 |
| WP_002287255 | 1343 | GGD | 1345 |
| WP_002288990 | 1343 | GGD | 1345 |
| WP_002289641 | 1343 | GGD | 1345 |
| WP_002290427 | 1343 | GGD | 1345 |
| WP_002295753 | 1343 | GGD | 1345 |
| WP_002296423 | 1343 | GGD | 1345 |
| WP_002304487 | 1357 | GGD | 1359 |
| WP_002305844 | 1343 | GGD | 1345 |
| WP_002307203 | 1343 | GGD | 1345 |
| WP_002310390 | 1343 | GGD | 1345 |
| WP_002352408 | 1343 | GGD | 1345 |
| WP_012997688 | 1343 | GGD | 1345 |
| WP_014677909 | 1343 | GGD | 1345 |
| WP_019312892 | 1343 | GGD | 1345 |
| WP_019313659 | 1343 | GGD | 1345 |
| WP_019314093 | 1343 | GGD | 1345 |
| WP_019315370 | 1343 | GGD | 1345 |
| WP_019803776 | 1343 | GGD | 1345 |
| WP_019805234 | 1343 | GGD | 1345 |
| WP_024783594 | 1343 | GGD | 1345 |
| WP_024784288 | 1353 | GGD | 1355 |
| WP_024784666 | 1343 | GGD | 1345 |
| WP_024784894 | 1343 | GGD | 1345 |
| WP_024786433 | 1353 | GGD | 1355 |
| WP_049473442 | 1343 | GGD | 1345 |
| WP_049474547 | 1343 | GGD | 1345 |
| EMC03581 | 1336 | GGD | 1338 |
| WP_000428612 | 1371 | GED | 1373 |
| WP_000428613 | 1369 | GED | 1371 |
| WP_049523028 | 1364 | GEE | 1366 |
| WP_003107102 | 1335 | GGD | 1337 |
| WP_054279288 | 1366 | GGD | 1368 |
| WP_049531101 | 1374 | GED | 1376 |
| WP_049538452 | 1374 | GED | 1376 |
| WP_049549711 | 1376 | GED | 1378 |
| WP_007896501 | 1372 | GGD | 1374 |
| EFR44625 | 1324 | GGD | 1326 |
| WP_002897477 | 1368 | GEE | 1370 |
| WP_002906454 | 1375 | GED | 1377 |
| WP_009729476 | 1369 | GED | 1371 |
| CQR24647 | 1359 | GGE | 1361 |
| WP_000066813 | 1373 | GED | 1375 |
| WP_009754323 | 1369 | GED | 1371 |
| WP_044674937 | 1362 | GGD | 1364 |
| WP_044676715 | 1364 | GGD | 1366 |
| WP_044680361 | 1364 | GGD | 1366 |
| WP_044681799 | 1362 | GGD | 1364 |
| WP_049533112 | 1384 | GED | 1386 |
| WP_029090905 | | --- | |
| WP_006506696 | | --- | |
| AIT42264 | 1366 | GGD | 1389 |
| WP_034440723 | | --- | |
| AKQ21048 | 1366 | GGD | 1384 |
| WP_004636532 | 1330 | -ED | 1332 |
| WP_002364836 | 1336 | -VD | 1337 |
| WP_016631044 | 1287 | -VD | 1288 |
| EMS75795 | 1077 | GEQ | 1079 |
| WP_002373311 | 1336 | -VD | 1337 |
| WP_002378009 | 1336 | -VD | 1337 |
| WP_002407324 | 1336 | -VD | 1337 |
| WP_002413717 | 1336 | -VD | 1337 |
| WP_010775580 | 1338 | -VD | 1339 |
| WP_010818269 | 1336 | -VD | 1337 |
| WP_010824395 | 1336 | -VD | 1337 |
| WP_016622645 | 1336 | -VD | 1337 |
| WP_033624816 | 1336 | -VD | 1337 |
| WP_033625576 | 1336 | -VD | 1337 |
| WP_033789179 | 1336 | -VD | 1337 |
| WP_002310644 | | --- | |
| WP_002312694 | | --- | |
| WP_002314015 | | --- | |
| WP_002320716 | | --- | |
| WP_002330729 | | --- | |
| WP_002335161 | | --- | |
| WP_002345439 | | --- | |
| WP_034867970 | 1334 | GEQ | 1336 |
| WP_047937432 | | --- | |
| WP_010720994 | 1334 | GEQ | 1336 |
| WP_010737004 | 1334 | GEQ | 1336 |
| WP_034700478 | 1334 | GEQ | 1336 |
| WP_007209003 | | --- | |
| WP_023519017 | 1327 | GER | 1330 |
| WP_010770040 | 1333 | -VD | 1334 |
| WP_048604708 | 1329 | -GD | 1330 |
| WP_010750235 | 1337 | GVQ | 1339 |
| AII16583 | 1405 | GGD | 1424 |
| WP_029073316 | | --- | |
| WP_031589969 | | --- | |
| KDA45870 | | --- | |
| WP_039099354 | | --- | |
| AKP02966 | | --- | |
| WP_010991369 | 1333 | -DD | 1334 |
| WP_033838504 | 1333 | -DD | 1334 |
| EHN60060 | 1336 | -DD | 1337 |
| EFR89594 | 1102 | -DD | 1103 |
| WP_038409211 | 1333 | -ED | 1334 |
| EFR95520 | 952 | -ED | 953 |
| WP_003723650 | 1333 | -DD | 1334 |
| WP_003727705 | 1333 | -DD | 1334 |
| WP_003730785 | 1333 | -DD | 1334 |
| WP_003733029 | 1333 | -DN | 1334 |
| WP_003739838 | 1333 | -DG | 1334 |
| WP_014601172 | 1333 | -DD | 1334 |
| WP_023548323 | 1333 | -DS | 1334 |
| WP_031665337 | 1333 | -DD | 1334 |
| WP_031669209 | 1333 | -DN | 1334 |
| WP_033920898 | 1333 | -DS | 1334 |
| AKI42028 | 1336 | -DD | 1337 |
| AKI50529 | 1336 | -DS | 1337 |
| EFR83390 | 781 | -DD | 782 |
| WP_046323366 | 1333 | -DD | 1334 |
| AKE81011 | 1382 | GGD | 1400 |
| CUO82355 | | --- | |
| WP_033162887 | | --- | |
| AGZ01981 | 1399 | GGD | 1417 |
| AKA60242 | 1366 | GGD | 1368 |
| AKS40380 | 1366 | GGD | 1376 |
| 4UN5_B | 1370 | GGD | 1372 |

[0304] Additional suitable Cas9 sequences in which amino acid residues homologous to residues 10, 122, 137, 182, 262, 294, 409, 480, 543, 660, 694, 840, 1219, and/or 1329 of SEQ ID NO: 9 can be identified are known to those of skill in the art. See, e.g., Supplementary Table S2 and Supplementary Figure S2 of Fonfara et al., Phylogeny of Cas9 determines functional exchangeability of dual-RNA and Cas9 among orthologous type II CRISPR-Cas systems, Nucl. Acids Res. 2013, doi: 10.1093/nar/gkt1074, which are incorporated herein by reference in their entirety. Cas9 variants of the sequences provided herein or known in the art comprising one or more mutations, e.g., at least one, at least two, at least three, at least four, at least five, at least six, or at least seven mutations as provided herein, e.g., of one or more amino acid residue that is homologous to amino acid residue 10, 122, 137, 182, 262, 294, 409, 480, 543, 660, 694, 840, 1219, and/or 1329 in SEQ ID NO: 9 are provided by this disclosure, for example, Cas9 variants comprising a A262T, K294R, S409I, E480K, E543D, M694I, and/or E1219V mutation.

### Example 4: Evolution of Cas9 with Broadened PAM Specificities

[0305] By evolving S. pyogenes Cas9 on a NNN PAM library using PACE, Cas9s with broadened PAM specificities have been evolved with higher activities for many non-canonical PAMs. Such a Cas9 still retains its native DNA binding and cutting activity and can be utilized with all of the current tools available. It has been hypothesized that by modulating Cas9's interactions with the DNA, the PAM specificity of Cas9 can be modified and expanded. Other Cas9s such as Staphylococcus aureus could also be engineered to change and expand their PAM specificity by such a method. Methods to modulate DNA binding such as targeted mutagenesis of the Cas9 protein, fusions to DNA-binding proteins, and the use of multiple Cas9 proteins tethered to each other could also expand the PAMs that can be targeted.

[0306] Cas9 Evolution. After evolution using overnight propagation of the phage with the mutagenesis plasmid (MP), the resultant phages containing mutations, discussed above, in PACE were used. Twenty-four individual phages were sequenced from the PACE run. Mutations found in the Cas9 gene are documented in Table 3 below. The Cas9 gene containing these mutations was cloned out of the phage and into plasmids to test both DNA binding and cutting activity.

TABLE 3
Cas9 mutations

| | | | | | | | | | | | | |
|---|---|---|---|---|---|---|---|---|---|---|---|---|
| pJH306 (WT | | | | | | | | | | | | |
| dCas9-VPR) | | | | | | | | | | | | |
| pJH407 | | | | | | | | | | | | |
| (WT Cas9) | | | | | | | | | | | | |
| pJH562 | | | | | | E480K | E543D | | E1219V | | | |
| (dCas9-VPR) | | | | | | | | | | | | |
| pJH599 | A262T | | | | S409I | E480K | E543D | M694I | E1219V | | | |
| (dCas9-VPR) | | | | | | | | | | | | |
| pJH600 | | | K294R | | | E480K | E543D | | E1219V | | Q1256K | L1362P |
| (dCas9-VPR) | | | | | | | | | | | | |
| pJH601 | A262T | | | | S409I | E480K | E543D | M694I | E1219V | | | |
| (dCas9-VPR) | | | | | | | | | | | | |
| pJH602 | | | K294R | | | E480K | E543D | | E1219V | | Q1256K | |
| (dCas9-VPR) | | | | | | | | | | | | |
| pJH603 | A262T | | | | S409I | E480K | E543D | M694I | E1219V | | | |
| (dCas9-VPR) | | | | | | | | | | | | |
| pJH604 | | S267G | K294R | | | E480K | E543D | | E1219V | N1224K | Q1256K | |
| (dCas9-VPR) | | | | | | | | | | | | |
| pJH605 | A262T | | | F405I | S409I | E480K | E543D | M694I | E1219V | | | |
| (dCas9-VPR) | | | | | | | | | | | | |
| pJH760 (pJH599 | A262T | | | | S409I | E480K | E543D | M694I | E1219V | | | |
| Minus VPR, | | | | | | | | | | | | |
| Nuclease | | | | | | | | | | | | |
| Positive) | | | | | | | | | | | | |

[0307] GFP Activation in Human Cell Culture. Testing was performed on a reporter with a GFP reporter activated by dCas9-VPR. Testing was performed on 5′-NGG-3′ PAM first (FIGS. 4A and 4B) and then with a library of GFP reporters all containing the same Cas9 target site, but with NNN at the PAM position (FIGS. 5A and 5B). In this testing, dCas9-VPR was found to activate the GFP signal. Wild-type Cas9 with no mutations (pJH306), Cas9 evolved from overnight propagation (pJH562), and Cas9 evolved from PACE (pJH599-pJH605) were all tested. Mutations for each Cas9 are documented in Table 3 above.

[0308] dCas9-VPR on all 64 PAM Sequences. pJH306 (WT dCas9-VPR) and pJH599 (WT dCas9-VPR with mutations A262T, S409I, E480K, E543D, M694I, and E1219V) were tested on all 64 PAM sequences (FIG. 6). dCas9-VPR was used to activate GFP as before and a different reporter plasmid was used for each well to ascertain the activation efficiency for all 64 different PAM sequences. The mean GFP fluorescence was measured for all transfected cells, as gated by iRFP signal. pJH599 showed either improved or similar levels of activation as compared to pJH306 for all PAM sequences.

[0309] In Vitro Cutting Assay. The ability of expressed and purified WT Cas9 (WT) and Cas 9 with an E1219V mutation (1) to cut DNA with different PAMs was tested (FIG. 7). Cas9 was incubated with dsDNA containing the target site. Cutting was measured by running the DNA on a gel to compare the amount of uncut product to the amount of cut products, which run faster due to their smaller size. The E1219V mutation was found to increase Cas9 cutting activity on non-canonical PAMs while maintaining activity on 5′-NGG-3′ PAMs.

[0310] Evolving Different Systems. In addition to S. pyogenes Cas9 evolution, other Cas9 systems such as S. aureus, S. thermophilus, N. meningitidis, and T. denticola, etc. can be evolved to modify and expand their PAM specificities. The data indicates that, by using a similar system to the S. pyogenes Cas9 evolution, a phage containing the S. aureus Cas9 can also be evolved to expand its PAM specificity.

[0311] Modulating PAM Specificity. By mutating neutral and negatively charged amino acids to positively charged amino acids, Cas9 could be modified to expand the PAMs that can be targeted. Generally, incorporating mutations into Cas9 proteins that generate a net increase in positive charge may increase the affinity of Cas9 to bind DNA. In combination with the Cas9 mutations provided herein, additional residues that could be mutated for increased PAM targeting in S. pyogenes Cas9 further include ones that have been identified to change the PAM specificity (D1135, G1218, R1333, R1335, T1337) 38 and residues that can increase Cas9 activity (S845 and L847) 37. Residues that increase Cas9 specificity such as the mutations of arginine, histidine, and lysine to alanine previously identified³⁷ and the mutations of asparagine, arginine, and glutamine to alanine as previously identified³⁹ could lead to lower tolerability for non-canonical PAMs as these mutations presumably decrease the interactions between the Cas9 and DNA.

[0312] Fusions to Modulate PAM Specificity. Programmable DNA-binding proteins such as zinc-finger domains, TALEs, and other Cas9 proteins could be fused to Cas9 to improve the ability to target nucleotide sequences having canonical or non-canonical PAMs, for example to increase activity, specificity or efficiency. A nuclease-null dCas9 could be fused to a nuclease active Cas9 to increase the ability of the nuclease active Cas9 to target different PAM sequences. One example of a nuclease-null dCas9 fused to a nuclease active Cas9 is shown in FIG. 8. Such fusions can be useful for improving the ability to target nucleotide sequences having canonical or non-canonical PAMs. The Cas9s could either be from the same species or from different species. Furthermore, both Cas9s could be nuclease-null dCas9, and could be further fused to effector proteins such as VP64, VP64-p65-Rta, FokI, GFP and other fluorescent proteins, deaminases, or any of the effector proteins provided herein.

[0313] Using Cas9 to Localize Other Nucleases and Other DNA-Binding Proteins. Cas9 can also be used to overcome the native binding specificity of other proteins by localizing them to their DNA targets. DNA nucleases, recombinases, deaminases, and other effectors often have a native DNA specificity. Cas9 can be fused to these proteins to overcome and expand their native DNA specificities. gRNAs will target the Cas9 adjacent to the DNA effector's target site and will help to localize them to their target site.

[0314] dCas9-VPR on NNNNN PAM Library. To test that the evolved Cas9s had not picked up specificity in the 4th and 5th PAM positions, dCas9-VPR on a NNNNN PAM library was tested. As seen with the NNN library, most of the constructs (e.g., pJH562, pJ559, pJH600, pJH601, pJH602, pJH603, and pJH605) showed improved activity. pJH599 consistently showed improvement in both the percentage of cells that showed GFP activation (FIG. 9A) and the mean fluorescence of those cells that showed GFP activation (FIG. 9B).

[0315] Cas9 GFP Cutting. The WT Cas9, pJH407, was compared with a nuclease-positive evolved Cas9, pJH760 (FIG. 10). pJH760 contained the same mutations as pJH599 but without the D10A and H480A nuclease-inactivating mutations, and without the VPR fusion. A genomically integrated GFP gene was cut by Cas9 and the activity was measured by the loss of GFP signal in cells. On a site with 5′-NGG-3′ PAM, pJH407 and pJH760 showed comparable activity. On a site with GAT PAM, pJH760 showed a significant increase in activity as compared to pJH407.

### Example 5 Cas9:DNA Editing Enzyme Fusion Proteins

[0316] This disclosure further provides Cas9 fused with a DNA editing enzyme for the targeted editing of DNA sequences. FIG. 11 illustrates double stranded DNA substrate binding by DNA editing enzyme-dCas9:sgRNA complexes. The DNA editing enzyme shown is a deaminase. The structures according to FIG. 11 are identified in these sequences (36 bp: underlined, sgRNA target sequence: bold; PAM: boxed; 21 bp: italicized).

### Example 6 PAM Depletion Assay

[0317] In E. coli, a library of PAM sequences are encoded in a plasmid that also contains an antibiotic gene. If the Cas9 can cut the PAM sequences on the plasmid, the plasmid is not replicated and is lost; only plasmids that are uncut remain the population. The plasmids that were cut by the Cas9 can be determined by sequencing the initial plasmid population and the final plasmid population through high throughput sequencing. The proportion of the library consisting of each PAM sequence was obtained by dividing the number of reads containing the PAM sequence by the total number of reads. The depletion score was then calculated by dividing the proportion of the library containing the PAM section before the selection by the proportion of the library containing the PAM sequence after selection. Higher depletion scores signify higher cutting activity by the Cas9 of that particular PAM sequence. The results of the PAM depletion assay are shown in FIG. 12.

[0318] A number of PAM sequences that were not cut with the wild-type Cas9 were cut with the evolved Cas9 (xCas9 v1.0, pJH760). Notably, all PAM sequences of the form NGN and NNG, as well as GAA and GAT showed a depletion greater than 10-fold with the xCas9. A single G in either the second or third PAM position could be sufficient for cutting with the newly evolved Cas9, opening up the sequence space significantly for the target sites that can be targeted using Cas9. The PAM depletion scores are given in Table 4.

TABLE 4
PAM Depletion Scores

| PAM Sequence | WT Cas9 | xCas9 v1.0 |
|---|---|---|
| TCG | 0.96 | 32.75 |
| CAG | 12.63 | 32.01 |
| GCG | 1.38 | 31.14 |
| ACG | 1.12 | 30.15 |
| TGG | 18.99 | 30.13 |
| TGT | 1.01 | 28.37 |
| GGC | 11.78 | 28.17 |
| AGA | 1.25 | 27.80 |
| GAG | 19.47 | 27.71 |
| GGT | 12.22 | 27.59 |
| CGA | 1.27 | 27.53 |
| CGT | 0.97 | 27.30 |
| TGA | 1.72 | 27.02 |
| GGA | 16.03 | 26.90 |
| AGG | 17.80 | 26.19 |
| TAG | 9.54 | 25.98 |
| CGC | 1.76 | 25.88 |
| AGT | 0.97 | 24.88 |
| CGG | 19.03 | 24.77 |
| AAG | 15.40 | 24.16 |
| GTG | 3.76 | 23.71 |
| ATG | 1.26 | 23.48 |
| GGG | 17.59 | 23.01 |
| TGC | 1.71 | 23.00 |
| TTG | 0.98 | 22.15 |
| GAA | 1.04 | 20.96 |
| AGC | 1.43 | 16.85 |
| GAT | 1.02 | 16.09 |
| CTG | 1.29 | 13.88 |
| CCG | 1.02 | 11.86 |
| CAT | 0.99 | 5.75 |
| CAA | 1.00 | 5.28 |
| GAC | 0.98 | 3.96 |
| TAA | 0.97 | 1.90 |
| AAA | 1.02 | 1.81 |
| TAT | 0.95 | 1.56 |
| CAC | 1.01 | 1.48 |
| GTA | 0.94 | 1.42 |
| AAT | 0.98 | 1.39 |
| GCA | 0.98 | 1.22 |
| ACA | 0.95 | 1.13 |
| AAC | 1.08 | 1.09 |
| TAC | 0.92 | 0.95 |
| ATA | 1.04 | 0.94 |
| GTC | 0.99 | 0.92 |
| GCT | 0.99 | 0.87 |
| TCA | 0.94 | 0.84 |
| CTA | 0.95 | 0.83 |
| GCC | 0.99 | 0.82 |
| GTT | 0.97 | 0.81 |
| TCC | 0.98 | 0.80 |
| ACC | 0.96 | 0.80 |
| CTC | 0.92 | 0.80 |
| CCA | 0.97 | 0.79 |
| CCC | 0.95 | 0.79 |
| CTT | 0.96 | 0.79 |
| ATC | 0.96 | 0.78 |
| CCT | 0.94 | 0.78 |
| ATT | 0.93 | 0.77 |
| ACT | 0.89 | 0.77 |
| TTT | 0.94 | 0.77 |
| TCT | 0.95 | 0.77 |
| TTC | 0.96 | 0.76 |
| TTA | 0.94 | 0.76 |

### Example 7: GFP Cutting Mammalian Cells

[0319] Wild-type or evolved Cas9 and gRNAs were transfected into mammalian cells containing a genomically integrated GFP gene. Different gRNAs targeted different sites with different PAM sequences, such that cutting of the GFP by Cas9 would lead to a loss of the GFP signal. The GFP signal was quantified after five days with flow cytometry. As shown in FIG. 13, evolved Cas9 cut GFP in mammalian, in line with the results in the GFP activation assay and in the PAM depletion assay. High throughput sequencing around the cut site verified the results seen with the flow cytometer; the indels were proportional to the cutting percentage seen with the flow cytometer.

### Example 8: Further Evaluation of the HHH Library

[0320] As SpCas9 has a preference for the G residues at the second and third base, evaluation was continued using the end point from the last evolution on a HHH (H=A, C, or T) PAM library. After evolution, 13 colonies were sequenced and a number of new mutations were identified. Three mutations, the E1219V, E480K, and E543D mutations were found in all the clones. A number of the clones either had the S267G/K294R/Q1256K mutations or the A262T/S409I mutations but those mutations were never seen together, suggesting that the clones had taken two divergent paths along the evolutionary landscape. The new mutations are given in Table 5.

TABLE 5
New Mutations

| HHH | HHH | HHH | HHH | HHH | HHH | HHH | HHH | HHH | HHH | HHH | HHH | HHH |
|---|---|---|---|---|---|---|---|---|---|---|---|---|
| #1 | #2 | #3 | #4 | #5 | #6 | #7 | #8 | #9 | #10 | #11 | #12 | #13 |
| (xCas9 | (xCas9 | (xCas9 | (xCas9 | (xCas9 | (xCas9 | (xCas9 | (xCas9 | (xCas9 | (xCas9 | (xCas9 | (xCas9 | (xCas9 |
| 2.0) | 2.1) | 2.2) | 2.3) | 2.4) | 2.5) | 2.6) | 2.7) | 2.8) | 2.9) | 2.10) | 2.11) | 2.12) |
| | | D23N | | | | | | | | | | |
| | | E108G | | | | | | | | | | |
| R115H | | | | | | | | | | | | |
| K141Q | | | | | | | | | | | | |
| | | | | | | | | | D180N | | | |
| | | | | | | | | P230S | | | | P230S |
| | | | D257N | | | | | | | | | |
| | | A262T | | | | A262T | | | | A262T | | |
| S267G | S267G | | S267G | | S267G | | | S267G | | | S267G | S267G |
| | | | | | | | | | D284N | | | |
| K294R | K294R | | K294R | | K294R | | K294R | K294R | | | K294R | K294R |
| | | | | | | R324L | | | | | | |
| Q394H | | | | | | | | | | | | |
| | | S409I | | S409I | | S409I | | | | S409I | | |
| | | | | LA55F | | | | | | | | |
| | | | T466A | | | | | | | | | |
| | | | | | | | | | T474I | | | |
| E480K | E480K | E480K | E480K | E480K | E480K | E480K | E480K | E480K | E480K | E480K | E480K | E480K |
| E543D | E543D | E543D | E543D | E543D | E543D | E543D | E543D | E543D | E543D | E543D | E543D | E543D |
| | | | | | | | | | K554R | | | |
| | | | | R654L | | | | | | | | |
| | | M694I | | | | M694I | | | | M694I | | |
| | | | | | | | A711E | | | | | |
| | | L727P | | | | | | | | | | |
| | | | | | | | | | M763I | | | |
| | | | I1063V | | | | | | | | | |
| | | | | V1100I | | | | | | | | |
| E1219V | E1219V | E1219V | E1219V | E1219V | E1219V | E1219V | E1219V | E1219V | E1219V | E1219V | E1219V | E1219V |
| | | | | | | | | | K1244N | | | |
| Q1256K | Q1256K | | Q1256K | | Q1256K | | Q1256K | Q1256K | | | Q1256K | Q1256K |
| | | K1289Q | | | | | | | | | | |
| | | | | A1323S | | | | | | | | |

### Example 9: Further Evolved Cas9 Proteins for Gene Editing

[0321] pJH760, described in Example 6, was tested in the PAM depletion assay on a number of new targets. Four new targets were selected: re2 (GGGGCCACTAGGGACAGGAT (SEQ ID NO: 314)), a synthetic target previously used for GFP activation in mammalian cells; VEGF (GGGTGGGGGGAGTTTGCTCC (SEQ ID NO: 315)), a target within the VEGF gene, CLTA (GCAGATGTAGTGTTTCCACA (SEQ ID NO: 316)), a target within the CLTA gene; and CCR5D (TCACTATGCTGCCGCCCAGT (SEQ ID NO: 317)), a target within the CCR5D gene. The results of the PAM depletion assay are given in FIGS. 14 to 17. It was found that, in addition to the canonical NGG sequence, PAM depletion demonstrates cutting for most NGN and some NNG sequences as well.

[0322] The HHH PAM library was further evolved using the end point from the last evolution on a HHH (H=A, C, or T) PAM library. After evolution, 13 colonies were sequenced and a number of new mutations were identified. Three mutations, the E1219V, E480K, and E543D mutations were found in all the clones. A number of the clones either had the K294R/Q1256K mutations or the A262T/S409I mutations but those mutations were never seen together, suggesting that the clones had taken two divergent paths along the evolutionary landscape. The new mutations are given in Tables 8 and 9 below.

[0323] As expected, variation in activity was seen with different targets. The PAM depletion assay scores are given in Table 10. NGN consistently showed cutting activity with some targets. Variation was seen amongst the xCas9 3.x mutants in terms of which mutant had the best activity. Of note, xCas9 3.3 contained the K294R/Q1256K series of mutations, while the other three mutants (3.6, 3.7, and 3.8) contained the A262T/S409I series of mutations. xCas9 3.6 and 3.7 outperformed 3.8. While 3.3 seemed to have the highest activity for most cases, 3.6 and 3.7 performed better on certain PAM sequences. The results of the PAM depletion assays for three of the new targets described above are given in FIGS. 18 to 20.

[0324] A NNNNN PAM depletion library was constructed. It was assayed to examine any fourth or fifth base specificity. Initial results of the PAM depletion assay show that there is no preference at the fourth and fifth base as expected.

[0325] In summary, E1219V was found to be one of the earliest mutations that fixed in the evaluation. It is close to the PAM sequence in the crystal structure. E480K and E543D were also seen in all of the clones from the early stages of the evolution, and may be important. K294R/Q1256K and A262T/S409I seem to be two divergent paths, and may be important. Their PAM sequence profiles seem to be slightly different, which implies their importance relative to PAM activity determination.

TABLE 6
Diseases/disorders containging T to C Changes. The table includes human gene
mutations that may be corrected by changing a cytosine (C) to a thymine (T). The gene
name, gene symbol,and Gene ID are indicated.

| SEQ | | | | |
|---|---|---|---|---|
| ID | | Gene | Gene | |
| NO: | Name | ID | Symbol | Flanks |
| 674 | NM_000410.3(HFE): c.314T > C | 3077 | HFE | [′ATGTTCACTGTTGACTTCTGGACTAYTATGG |
| | (p.Ile105Thr) | | | AAAATCACAACCACAGCAAG′] |
| 675 | NM_144631.5(ZNF513): | 130557 | ZNF513 | [′GCTGGGAGCTGCCATGTGTGGGCGCYGCAT |
| | c.1015T > C (p.Cys339Arg) | | | GCGAGGAGAGGCTGGAGGGGG′] |
| 676 | NM_001199107.1(TBC1D24): | 57465 | TBC1D24 | [′CGTGGCGCTGGCCATCCTCAAGTTCYTCCAC |
| | c.751T > C (p.Phe251Leu) | | | AAGGTGAGGGCCGGGCAGCC′] |
| 677 | NM_001708.2(OPN1SW): | 611 | OPN1SW | [′CATCTTCTGCTTCATTGTGCCTCTCBCCCTCA |
| | c.640T > C (p.Ser214Pro) | | | TCTGCTTCTCCTACACTCA′] |
| 678 | NM_000235.3(LIPA): c.599T > C | 3988 | LIPA | [′AAAAGGATTAAAATGTTTTTTGCCCYGGGTC |
| | (p.Leu200Pro) | | | CTGTGGCTTCCGTCGCCTTC′] |
| 679 | NM_000071.2(CBS): c.833T > C | 875 | CBS | [′CTGAAGCCGCGCCCTCTGCAGATCAYTGGG |
| | (p.Ile278Thr) | | | GTGGATCCCGAAGGGTCCATC′] |
| 680 | NM_000071.2(CBS): c.1616T > C | 875 | CBS | [′TTCGGGGTGGTCACCGCCATTGACTYGCTGA |
| | (p.Leu539Ser) | | | ACTTCGTGGCCGCCCAGGAG′] |
| 681 | NM_033409.3(SLC52A3): | 113278 | SLC52A3 | [′CGCCCACTTCTCACCCCTGGTCTTCYTCCTCC |
| | c.670T > C (p.Phe224Leu) | | | TCCTATCCATCATGATGGC′] |
| 682 | NM_033409.3(SLC52A3): | 113278 | SLC52A3 | [′CTTTTCAGCGGCTGCCTCAGTTACGYCAAGG |
| | c.1238T > C (p.Val413Ala) | | | TGATGCTGGGCGTGGTCCTG′] |
| 683 | NM_000274.3(OAT): c.163T > C | 4942 | OAT | [′GGAATATAAGTATGGTGCACACAACYACCA |
| | (p.Tyr55His) | | | TCCTTTACCTGTAGCCCTGGA′] |
| 684 | NM_000274.3(OAT): c.1205T > C | 4942 | OAT | [′TGTCTACGACTTCGAGATAATGGACYTCTGG |
| | (p.Leu402Pro) | | | CCAAGCCAACCCATGGCGAC′] |
| 685 | NM_000274.3(OAT): c.1180T > C | 4942 | OAT | [′TTTAGATTGGGATGCTTGGAAGGTGYGTCTA |
| | (p.Cys394Arg) | | | CGACTTCGAGATAATGGACT′] |
| 686 | NM_001385.2(DPYS): c.1078T > | 1807 | DPYS | [′TGTTGAAGATCGGATGTCCGTAATAYGGGA |
| | C (p.Trp360Arg) | | | AAAAGGCGTGGTGGGTTTCAC′] |
| 687 | NM_000027.3(AGA): c.916T > C | 175 | AGA | [′TCCAGAATTCTTTGGGGCTGTTATAYGTGCC |
| | (p.Cys306Arg) | | | AATGTGACTGGAAGTTACGG′] |
| 688 | NM_000027.3(AGA): c.214T > C | 175 | AGA | [′GTGTGAGAGAGAGCAGTGTGACGGCYCTGT |
| | (p.Ser72Pro) | | | AGGCTTTGGAGGAAGTCCTGA′] |
| 689 | NM_000398.6(CYB5R3): | 1727 | CYB5R3 | [′CAAGTTTCCCGCTGGAGGGAAGATGYCTCA |
| | c.382T > C (p.Ser128Pro) | | | GTACCTGGAGAGCATGCAGAT′] |
| 690 | NM_000398.6(CYB5R3): | 1727 | CYB5R3 | [′GAGTTCCGGGGCCCCAGTGGGCTGCYGGTC |
| | c.446T > C (p.Leu149Pro) | | | TACCAGGGCAAAGGTGATTCG′] |
| 691 | NM_000398.6(CYB5R3): | 1727 | CYB5R3 | [′GAAGGACCCTGATGACCACACTGTGYGCCA |
| | c.610T > C (p.Cys204Arg) | | | CCTGCTCTTTGCCAACCAGGT′] |
| 692 | NM_000398.6(CYB5R3): | 1727 | CYB5R3 | [′CCGTCACCCCAGCACATCCTGGGCCYCCCTG |
| | c.218T > C (p.Leu73Pro) | | | TCGGTGAGTCACGCCCCTGC′] |
| 693 | NM_000552.3(VWF): c.4883T > C | 7450 | VWF | [′CCTGGAGACATCCAGGTGGTGCCCAYTGGA |
| | (p.Ile1628Thr) | | | GTGGGCCCTAATGCCAACGTG′] |
| 694 | NM_000552.3(VWF): c.4837T > C | 7450 | VWF | [′CTACATGGTCACCGGAAATCCTGCCYCTGAT |
| | (p.Ser1613Pro) | | | GAGATCAAGAGGCTGCCTGG′] |
| 695 | NM_000552.3(VWF): c.3814T > C | 7450 | VWF | [′GGAACCGCCGTTGCACGATTTCTACBGCAGC |
| | (p.Cys1272Arg) | | | AGGCTACTGGACCTGGTCTT′] |
| 696 | NM_000552.3(VWF): c.8317T > C | 7450 | VWF | [′CAACGATGTGCAGGACCAGTGCTCCYGCTG |
| | (p.Cys2773Arg) | | | CTCTCCGACACGGACGGAGCC′] |
| 697 | NM_000552.3(VWF): c.3445T > C | 7450 | VWF | [′TGAGTGTGAGTGGCGCTATAACAGCYGTGC |
| | (p.Cys1149Arg) | | | ACCTGCCTGTCAAGTCACGTG′] |
| 698 | NM_000552.3(VWF): c.3178T > C | 7450 | VWF | [′GAAGCAGACGATGGTGGATTCCTCCYGTAG |
| | (p.Cys1060Arg) | | | AATCCTTACCAGTGACGTCTT′] |
| 699 | NM_001042492.2(NF1): c.5858T | 4763 | NF1 | [′TGTTTGGAATACATGACTCCATGGCYGTCAA |
| | > C (p.Leu1953Pro) | | | ATCTAGTTCGTTTTTGCAAG′] |
| 700 | NM_000267.3(NF1): c.1523T > C | 4763 | NF1 | [′ATTCATGCAGATCCAAAGCTCTTGCYTTGTG |
| | (p.Leu508Pro) | | | TAAGTATTTTTTTATGAAAT′] |
| 701 | NM_000267.3(NF1): c.6200T > C | 4763 | NF1 | [′ATTTTAGCACGCTACATGCTGATGCYGTCCT |
| | (p.Leu2067Pro) | | | TCAACAATTCCCTTGATGTG′] |
| 702 | NM_000267.3(NF1): c.1070T > C | 4763 | NF1 | [′CTGTTGGGGTTTTTATAGAACCTGCYTTTTA |
| | (p.Leu357Pro) | | | ATCCAAGTAAGCCATTCTCA′] |
| 703 | NM_000267.3(NF1): c.3728T > C | 4763 | NF1 | [′TCTCAGGATGAACTAGCTCGAGTTCYGGTTA |
| | (p.Leu1243Pro) | | | CTCTGTTTGATTCTCGGCAT′] |
| 704 | NM_000308.2(CTSA): c.247T > C | 5476 | CTSA | [′CTCCGGCTCCAAGCACCTCCACTACYGGTCT |
| | (p.Trp83Arg) | | | GCCGCCCTGCCTTCTGGGCG′] |
| 705 | NM_001127695.1(CTSA): | 5476 | CTSA | [′ATCTCCTACAGGCTTTGGTCTTCTCYCCAGA |
| | Tc.707 > C (p.Leu236Pro) | | | CCCACTGCTGCTCTCAAAAC′] |
| 706 | NM_000308.2(CTSA): c.1271T > | 5476 | CTSA | [′GATGTAGACATGGCCTGCAATTTCAYGGGG |
| | C (p.Met424Thr) | | | GATGAGTGGTTTGTGGATTCC′] |
| 707 | NM_000405.4(GM2A): c.412T > | 2760 | GM2A | [′GCGTACCTATGGGCTTCCTTGCCACYGTCCC |
| | C (p.Cys138Arg) | | | TTCAAAGAAGTAAGTACTTA′] |
| 708 | NM_001165974.1(UROC1): | 131669 | UROC1 | [′CCAGAGTTTGCCCAGGAGCTGCAACYGTAC |
| | c.209T > C (p.Leu70Pro) | | | GGACACATCTACATGTACCGG′] |
| 709 | NM_003730.4(RNASET2): | 8635 | RNASET2 | [′ATATGGAGTGATACCCAAAATCCAGYGCCT |
| | c.550T > C (p.Cys184Arg) | | | TCCACCAAGCCAGGTTAGACA′] |
| 710 | NM_199069.1(NDUFAF3): | 25915 | NDUFAF3 | [′GACTTCGCCGCGCGTTGGTCAGCCAYGGCC |
| | c.2T > C (p.Met1Thr) | | | ACCGCTCTCGCGCTACGTAGC′] |
| 711 | NM_178012.4(TUBB2B): | 347733 | TUBB2B | [′CATGAACACCTTCAGCGTCATGCCCYCACCC |
| | c.514T> C (p.Ser172Pro) | | | AAGGTGTCAGACACGGTGGT′] |
| 712 | NM_178012.4(TUBB2B): | 347733 | TUBB2B | [′CCCACCTACGGGGACCTCAACCACCYGGTG |
| | c.683T > C (p.Leu228Pro) | | | TCGGCCACCATGAGCGGGGTC′] |
| 713 | NM_178012.4(TUBB2B): | 347733 | TUBB2B | [′CATGGTGCCCTTCCCTCGCCTGCACYTCTTC |
| | c.793T > C (p.Phe265Leu) | | | ATGCCCGGCTTCGCGCCCCT′] |
| 714 | NM_000110.3(DPYD): c.85T > C | 1806 | DPYD | [′TCGAACACAAACTCATGCAACTCTGYGTTCC |
| | (p.Cys29Arg) | | | ACTTCGGCCAAGAAATTAGA′] |
| 715 | NM_133459.3(CCBE1): c.520T > | 147372 | CCBE1 | [′CATCCGGGAAGATGATGGGAAGACAYGTAC |
| | C (p.Cys174Arg) | | | CAGGGGAGACAAATATCCCAA′] |
| 716 | NM_000035.3(ALDOB): c.442T > | 229 | ALDOB | [′GAAAGATGGTGTTGACTTTGGGAAGYGGCG |
| | C (p.Trp148Arg) | | | TGCTGTGCTGAGGATTGCCGA′] |
| 717 | NM_000320.2(QDPR): c.106T > C | 5860 | QDPR | [′AACCAAAGCTGTTTTCTCCTTCCAGYGGGTT |
| | (p.Trp36Arg) | | | GCCAGCGTTGATGTGGTGGA′] |
| 718 | NM_173560.3(RFX6): | 222546 | RFX6 | [′GCAGACACAGCTCACGCTGCAGTGGYGAGA |
| | c.380+2T > C | | | CTCGCCCGCAGGGTACACTGA′] |
| 719 | NM_173560.3(RFX6): c.649T > C | 222546 | RFX6 | [′AAAATGTACTAATTTTTTAAGGTTTYCTGGA |
| | (p.Ser217Pro) | | | AGCAAGCTAAAGAATGAGGT′] |
| 720 | NM_000037.3(ANK1): | 286 | ANK1 | [′CTGCGGGGCCTGTGACGTGCGGGCCRGGCC |
| | c.−108T > C | | | CCCGAGGGCCTTATCGGCCCC′] |
| 721 | NM_001145308.4(LRTOMT): | 220074 | LRTOMT | [′TCACATCCTCACCACCCTGGACCACYGGAGC |
| | c.313T > C (p.Trp105Arg) | | | AGCCGCTGCGAGTACTTGAG′] |
| 722 | NM_001012515.2(FECH): | 2235 | FECH | [′CCTGTCTGCAGGGAGACTAAATCCTYCTTCA |
| | c.1268T > C (p.Phe423Ser) | | | CCAGCCAGCAGCTGTGACCC′] |
| 723 | NM_000140.3(FECH): | 2235 | FECH | [′TATTGAGTAGAAAACATTTCTCAGGYTGCTA |
| | c.315 − 48T > C | | | AGCTGGAATAAAATCCACTT′] |
| 724 | NM_024120.4(NDUFAF5): | 79133 | NDUFAF5 | [′GCTGTCAATGACCTGGGACATCTGCYTGGG |
| | c.686T > C (p.Leu229Pro) | | | AGAGCTGGCTTTAATACTCTG′] |
| 725 | NM_000277.1(PAH): c.932T > C | 5053 | PAH | [′TTACAGGAAATTGGCCTTGCCTCTCYGGGTG |
| | (p.Leu311Pro) | | | CACCTGATGAATACATTGAA′] |
| 726 | NM_000277.1(PAH): c.764T > C | 5053 | PAH | [′GGCCTGCTTTCCTCTCGGGATTTCTYGGGTG |
| | (p.Leu255Ser) | | | GCCTGGCCTTCCGAGTCTTC′] |
| 727 | NM_000277.1(PAH): c.143T > C | 5053 | PAH | [′TCACTCAAAGAAGAAGTTGGTGCATYGGCC |
| | (p.Leu48Ser) | | | AAAGTATTGCGCTTATTTGAG′] |
| 728 | NM_000277.1(PAH): c. 1045T > C | 5053 | PAH | [′AAAGGCATATGGTGCTGGGCTCCTGBCATCC |
| | (p.Ser349Pro) | | | TTTGGTGAATTACAGGTATG′] |
| 729 | NM_000277.1(PAH): c.293T > C | 5053 | PAH | [′GCTCTGACAAACATCATCAAGATCTYGAGG |
| | (p.Leu98Ser) | | | CATGACATTGGTGCCACTGTC′] |
| 730 | NM_000277.1(PAH): c.734T > C | 5053 | PAH | [′TGCACTGGTTTCCGCCTCCGACCTGHGGCTG |
| | (p.Val245Ala) | | | GCCTGCTTTCCTCTCGGGAT′] |
| 731 | NM_000277.1(PAH): c.194T > C | 5053 | PAH | [′GAGAATGATGTAAACCTGACCCACANTGAA |
| | (p.Ile65Thr) | | | TCTAGACCTTCTCGTTTAAAG′] |
| 732 | NM_000130.4(F5): c.1160T > C | 2153 | F5 | [′CATTTGGATAATTTCTCAAACCAAAYTGGAA |
| | (p.Ile387Thr) | | | AACATTATAAGAAAGTTATG′] |
| 733 | NM_000512.4(GALNS): c.413T > | 2588 | GALNS | [′AAGGCCGGCTACGTCAGCAAGATTGYCGGC |
| | C (p.Val138Ala) | | | AAGTGGTAAGTCTCCTGGCCA′] |
| 734 | NM_018077.2(RBM28): | 55131 | RBM28 | [′TCCTTTGACTCAGAAGAAGAAGAACYTGGG |
| | c.1052T > C (p.Leu351Pro) | | | GAGCTTCTCCAACAGTTTGGA′] |
| 735 | NM_203395.2(IYD): c.347T > C | 389434 | IYD | [′AATGAGCAAGTCCCAATGGAAGTCAYTGAT |
| | (p.Ile116Thr) | | | AATGTCATCAGAACGGCAGGT′] |
| 736 | NM_015702.2(MMADHC): | 27249 | MMADHC | [′CATTTAGGATTCTCTGTTGATGACCYTGGAT |
| | c.776T > C (p.Leu259Pro) | | | GCTGTAAAGTGATTCGTCAT′] |
| 737 | NM_014165.3(NDUFAF4): | 29078 | NDUFAF4 | [′AAAGATGAAAAGCTGCTGTCGTTTCYAAAA |
| | c.194T > C (p.Leu65Pro) | | | GATGTGTATGTTGATTCCAAA′] |
| 738 | NM_001136271.2(NKX2-6): | 137814 | NKX2-6 | [′GCAGGTGCTGGCCCTGGAGCGGCGCYTCAA |
| | c.451T > C (p.Phe151Leu) | | | GCAGCAGCGGTACCTGTCAGC′] |
| 739 | NM_013319.2(UBIAD1): | 29914 | UBIAD1 | [′TATCTACTTTGGAGGCCTGTCTGGCYCCTTT |
| | c.511T > C (p.Ser171Pro) | | | CTCTACACAGGAGGTAAGAT′] |
| 740 | NM_001127628.1(FBP1): | 2203 | FBP1 | [′TTGTCTAAAAAGGCCATCGGGGAGTYCATTT |
| | c.581T > C (p.Phe194Ser) | | | TGGTGGACAAGGATGTGAAG′] |
| 741 | NM_000046.3(ARSB): c.349T > C | 411 | ARSB | [′TTTACAGCACCAAATAATCTGGCCCYGTCAG |
| | (p.Cys117Arg) | | | CCCAGCTGTGTTCCTCTGGA′] |
| 742 | NM_000046.3(ARSB): c.707T > C | 411 | ARSB | [′TCTTTCCAGCCTCTGTTTCTCTACCYTGCTCT |
| | (p.Leu236Pro) | | | CCAGTCTGTGCATGAGCCC′] |
| 743 | NM_000404.2(GLB1): c.152T > C | 2720 | GLB1 | [′AAGGATGGCCAGCCATTTCGCTACAYCTCA |
| | (p.Ile51Thr) | | | GGAAGCATTCACTACTCCCGT′] |
| 744 | NM_000404.2(GLB1): c.247T > C | 2720 | GLB1 | [′AAGGGGCTGTGTGTGTCTTGGCAGGBATGTG |
| | (p.Tyr83His) | | | CCCTGGAACTTTCATGAGCC′] |
| 745 | NM_024782.2(NHEJ1): c.367T > | 79840 | NHEJ1 | [′CCTCCCCTTCTATTGGAATTTCCACYGCATG |
| | C (p.Cys123Arg) | | | CTAGCTAGTCCTTCCCTGGT′] |
| 746 | NM_139241.3(FGD4): c.893T > C | 121512 | FGD4 | [′CAGAAATTGGCACCATTCCTTAAGABGTATG |
| | (p.Met298Thr) | | | GAGAATATGTGAAAGGATTT′] |
| 747 | NM_020631.4(PLEKHG5): | 57449 | PLEKHG5 | [′TTGGGCCTTCCCTAACCAGGGTCCTYCCTCC |
| | c.1940T > C (p.Phe647Ser) | | | TTATCTACCTGAATGAGTTT′] |
| 748 | NM_015559.2(SETBP1): | 26040 | SETBP1 | [′GAGACGATCCCCAGCGACAGCGGCAYTGGG |
| | c.2612T > C (p.Ile871Thr) | | | ACAGACAACAACAGCACTTCT′] |
| 749 | NM_138387.3(G6PC3): c.554T > | 92579 | G6PC3 | [′CTCCTAGGCGCTGTCCTGGGCTGGCYGATGA |
| | C (p.Leu185Pro) | | | CTCCCCGAGTGCCTATGGAG′] |
| 750 | NM_022489.3(INF2): c.556T > C | 64423 | INF2 | [′CTTCAGCATTGTCATGAACGAGCTCYCCGGC |
| | (p.Ser186Pro) | | | AGCGACAACGTGCCCTACGT′] |
| 751 | NM_022489.3(INF2): c.125T > C | 64423 | INF2 | [′GACCCCGAGCTGTGCATCCGGCTGCYCCAG |
| | (p.Leu42Pro) | | | ATGCCCTCTGTGGTCAACTAC′] |
| 752 | NM_018122.4(DARS2): | 55157 | DARS2 | [′TTTGAAATTAAGAACTTCGTGAAGGBACCA |
| | c.492+2T > C | | | ACCTCTGTTATTAATAAAATA′] |
| 753 | NM_015272.3(RPGRIP1L): | 23322 | RPGRIP1L | [′CCTTCATCCCGAATATAACTTCACTYCTCAA |
| | c.1975T > C (p.Ser659Pro) | | | TATCTTGTTCATGTTAATGA′] |
| 754 | NM_001029871.3(RSPO4): | 343637 | RSPO4 | [′CTTCAGCCAGGACTTCTGCATCCGGYGCAAG |
| | c.319T > C (p.Cys107Arg) | | | AGGCAGTTTTACTTGTACAA′] |
| 755 | NM_000429.2(MAT1A): c.914T > | 4143 | MATIA | [′GCTGCCCGCTGGGTGGCCAAGTCTCYGGTG |
| | C (p.Leu305Pro) | | | AAAGCAGGGCTCTGCCGGAGA′] |
| 756 | NM_032581.3(FAM126A): | 84668 | FAM126A | [′AACATTTTGTCTTTCTTCTAGTTGCBAGAAC |
| | c.158T > C (p.Leu53Pro) | | | CTGTCTGTCACCAGCTCTTT′] |
| 757 | NM_006364.2(SEC23A): | 10484 | SEC23A | [′GGGTGATTCTTTCAATACTTCCTTAYTCAAA |
| | c.1144T > C (p.Phe382Leu) | | | CAAACTTTTCAAAGAGTCTT′] |
| 758 | NM_018006.4(TRMU): c.229T > | 55687 | TRMU | [′CCATCAAGTGTCCTACGTAAAGGAGYATTG |
| | C (p.Tyr77His) | | | GAATGATGTGTTCAGGTGAGT′] |
| 759 | NM_001174089.1(SLC4A11): | 83959 | SLC4A11 | [′CTGCAGGTGCTTCAGCTGCTGCTGCYGTGTG |
| | c.2480T > C (p.Leu827Pro) | | | CCTTCGGCATGAGCTCCCTG′] |
| 760 | NM_001174089.1(SLC4A11): | 83959 | SLC4A11 | [′AGTGACAGGGGTGCGGTACCAGCAGYCGTG |
| | c.589T > C (p.Ser197Pro) | | | GCTCTGCATCATGTGAGTTGC′] |
| 761 | NM_148960.2(CLDN19): | 149461 | CLDN19 | [′GCCCTGATGGTGGTGGCCGTGCTCCYGGGCT |
| | c.269T > C (p.Leu90Pro) | | | TCGTGGCCATGGTCCTCAGC′] |
| 762 | NM_153704.5(TMEM67): | 91147 | TMEM67 | [′AACACAGATGGTCAGACTTTTGAGAYTGCA |
| | c.2498T > C (p.Ile833Thr) | | | ATTTCTAACCAGATGAGACAA′] |
| 763 | NM_153704.5(TMEM67): | 91147 | TMEM67 | [′ACAGGTCTTTACTGGCTTATTTTCTYCAAAG |
| | c.1769T > C (p.Phe590Ser) | | | TGAGTGAGTTTCTGAATTTT′] |
| 764 | NM_153704.5(TMEM67): | 91147 | TMEM67 | [′AGAACGTTTTGTCACTTATGTTGGAHGTGCC |
| | c.1843T > C (p.Cys615Arg) | | | TTTGCTCTGAAGGTAAGTTT′] |
| 765 | NM_153704.5(TMEM67): | 91147 | TMEM67 | [′ACATCTTGTCAAGCTCTTGGAAATAYGTGTG |
| | c.755T > C (p.Met252Thr) | | | TGATGAACATGAATTCTTAC′] |
| 766 | NM_017777.3(MKS1): | 54903 | MKS1 | [′CCCCGTGCGCAACTTGCGCCTCCGGYAGTCG |
| | c.80+2T > C | | | CACCGCCCCAGCCCCGAGGC′] |
| 767 | NM_001041.3(SI): c.1022T > C | 6476 | SI | [′AATTACATGCTCATTTACTTTAAGCYTGTTG |
| | (p.Leu341Pro) | | | GACTACCAGCAATGCCAGCA′] |
| 768 | NM_001041.3(SI): c.1859T > C | 6476 | SI | [′ATGGAATGGTCTATAACTGGAATGCYGGAG |
| | (p.Leu620Pro) | | | TTCAGTTTGTTTGGAATACCT′] |
| 769 | NM_015506.2(MMACHC): | 25974 | MMACHC | [′CACCCCAACCGACGCCCCAAGATCCYGGCC |
| | c.347T > C (p.Leul16Pro) | | | CAGACAGCAGCCCATGTAGCT′] |
| 770 | NM_000190.3(HMBS): c.739T > | 3145 | HMBS | [′GCACGATCCCGAGACTCTGCTTCGCYGCATC |
| | C (p.Cys247Arg) | | | GCTGAAAGGGCCTTCCTGAG′] |
| 771 | NM_000190.3(HMBS): c.242T > | 3145 | HMBS | [′GAGAAAAGCCTGTTTACCAAGGAGCYTGAA |
| | C (p.Leu81Pro) | | | CATGCCCTGGAGAAGAATGAG′] |
| 772 | NM_000237.2(LPL): c.662T > C | 4023 | LPL | [′ACCAGAGGGTCCCCTGGTCGAAGCAYTGGA |
| | (p.Ile221Thr) | | | ATCCAGAAACCAGTTGGGCAT′] |
| 773 | NM_000237.2(LPL): c.337T > C | 4023 | LPL | [′AGACTCCAATGTCATTGTGGTGGACYGGCTG |
| | (p.Trp113Arg) | | | TCACGGGCTCAGGAGCATTA′] |
| 774 | NM_000237.2(LPL): c.755T > C | 4023 | LPL | [′AACATTGGAGAAGCTATCCGCGTGAYTGCA |
| | (p.Ile252Thr) | | | GAGAGAGGACTTGGAGGTAAA′] |
| 775 | NM_000263.3(NAGLU): | 4669 | NAGLU | [′GCTGGGGCCAGGCCCCGCGGCCGACYTCTC |
| | c.142T > C (p.Phe48Leu) | | | CGTGTCGGTGGAGCGCGCTCT′] |
| 776 | NM_000018.3(ACADVL): | 37 | ACADVL | [′GCGTGTGCTCCGAGATCTTCGCATCYTCCGG |
| | c.1372T > C (p.Phe458Leu) | | | ATCTTTGAGGGGACAAATGA′] |
| 777 | NM_018105.2(THAP1): c.241T > | 55145 | THAP1 | [′GAAAGAGAATGCTGTGCCCACAATAYTTCTT |
| | C (p.Phe81Leu) | | | TGTACTGAGCCACATGACAA′] |
| 778 | NM_005908.3(MANBA): | 4126 | MANBA | [′AGACAAGAGTCGTCCTTTTATTACGYCCAGT |
| | c.1513T > C (p.Ser505Pro) | | | CCTACAAATGGGGCTGAAAC′] |
| 779 | NM_000124.3(ERCC6): | 2074 | ERCC6 | [′AAGCAGTTTTTGACAAATAGAGTGCYAAAA |
| | c.2960T > C (p.Leu987Pro) | | | GACCCAAAACAAAGGCGGTTT′] |
| 780 | NM_014845.5(FIG4): c.122T > C | 9896 | FIG4 | [′GAAACGAAATATCGTGTCTTGAAGAYTGAT |
| | (p.Ile41Thr) | | | AGAACAGAACCAAAAGATTTG′] |
| 781 | NM_000787.3(DBH): | 1621 | DBH | [′GATGGGGACACTGCCTATTTTGCGGYGAGTC |
| | c.339 + 2T > C | | | TCTCCTCCCTGCCAGCTCTC′] |
| 782 | NM_000102.3(CYP17A1): | 1586 | CYP17AI | [′TCTAAAGGCAACTCTAGACATCGCGYCCAA |
| | c.316T > C (p.Ser106Pro) | | | CAACCGTAAGGGTATCGCCTT′] |
| 783 | NM_000102.3(CYP17A1): | 1586 | CYP17A1 | [′GGCGCTGCATCACAATGAGAAGGAGYGGCA |
| | c.1216T > C (p.Trp406Arg) | | | CCAGCCGGATCAGTTCATGCC′] |
| 784 | NM_000102.3(CYP17A1): | 1586 | CYP17A1 | [′GAGATCCTGGCCCGCCAGGAGCTCTYCCTCA |
| | c.1358T > C (p.Phe453Ser) | | | TCATGGCCTGGCTGCTGCAG′] |
| 785 | NM_152783.4(D2HGDH): | 728294 | D2HGDH | [′GGAGATGGTAACCTGCACCTCAATGYGACG |
| | c.1331T > C (p.Val444Ala) | | | GCGGAGGCCTTCAGCCCCTCG′] |
| 786 | NM_000255.3(MUT): c.313T > C | 4594 | MUT | [′TCCTACCATGTATACCTTTAGGCCCYGGACC |
| | (p.Trp105Arg) | | | ATCCGCCAGTATGCTGGTTT′] |
| 787 | NM_000411.6(HLCS): c.710T > C | 3141 | HLCS | [′CTGTACCAGAAGTTCATGGCCTATCYTTCTC |
| | (p.Leu237Pro) | | | AGGGAGGGAAGGTGTTGGGC′] |
| 788 | NM_022132.4(MCCC2): c.499T > | 64087 | MCCC2 | [′AATTGCCATGCAAAACAGGCTCCCCYGCAT |
| | C (p.Cys167Arg) | | | CTACTTAGGCAAGTCACCAGA′] |
| 789 | NM_020166.4(MCCC1): | 56922 | MCCC1 | [′CATTATGACCCCATGATTGCGAAGCYGGTCG |
| | c.1310T > C (p.Leu437Pro) | | | TGTGGGCAGCAGATCGCCAG′] |
| 790 | NM_198578.3(LRRK2): | 120892 | LRRK2 | [′ATTGCAAAGATTGCTGACTACGGCAYTGCTC |
| | c.6059T > C (p.Ile2020Thr) | | | AGTACTGCTGTAGAATGGGG′] |
| 791 | NM_000022.2(ADA): c.320T > C | 100 | ADA | [′GAGGTGCGGTACAGTCCGCACCTGCYGGCC |
| | (p.Leu107Pro) | | | AACTCCAAAGTGGAGCCAATC′] |
| 792 | NM_199242.2(UNC13D): | 201294 | UNC13D | [′CTGGCCGCCTCATTCAGCTCCCTGCYGACCT |
| | c.1208T > C (p.Leu403Pro) | | | ACGGCCTCTCCCTCATCCGG′] |
| 793 | NM_152443.2(RDH12): c.523T > | 145226 | RDH12 | [′CCCTGCACGGGTGGTTAATGTGTCCYCGGTG |
| | C (p.Ser175Pro) | | | GCTCACCACATTGGCAAGAT′] |
| 794 | NM_020435.3(GJC2): c.857T > C | 57165 | GJC2 | [′TGCCTGCTGCTCAACCTCTGTGAGAYGGCCC |
| | (p.Met286Thr) | | | ACCTGGGCTTGGGCAGCGCG′] |
| 795 | NM_000159.3(GCDH): c.883T > | 2639 | GCDH | [′CTTCGGCTGCCTGAACAACGCCCGGYACGG |
| | C (p.Tyr295His) | | | CATCGCGTGGGGCGTGCTTGG′] |
| 796 | NM_000920.3(PC): c.434T > C | 5091 | PC | [′CGGTTTATTGGGCCAAGCCCAGAAGBGGTC |
| | (p.Val145Ala) | | | CGCAAGATGGGAGACAAGGTG′] |
| 797 | NM_207118.2(GTF2H5): c.62T > | 404672 | GTF2H5 | [′GATCCTGCCATGAAGCAGTTTCTGCYGTACT |
| | C (p.Leu21Pro) | | | TGGATGAGTCCAATGCCCTG′] |
| 798 | NM_005787.5(ALG3): c.211T > C | 10195 | ALG3 | [′TCTTCTTCCAGACACAGAGATTGACYGGAA |
| | (p.Trp71Arg) | | | GGCCTACATGGCCGAGGTAGA′] |
| 799 | NM_024514.4(CYP2R1): | 120227 | CYP2R1 | [′GGCTATGATGTAGTAAAGGAATGCCYTGTTC |
| | c.296T > C (p.Leu99Pro) | | | ATCAAAGCGAAATTTTTGCA′] |
| 800 | NM_017929.5(PEX26): c.2T > C | 55670 | PEX26 | [′CTGGGCCTTGGACCCGGACTCGTTAYGAAG |
| | (p.Met1Thr) | | | AGCGATTCTTCGACCTCTGCA′] |
| 801 | NM_017929.5(PEX26): c.134T > | 55670 | PEX26 | [′CTTCTGGAGGAGGCGGCCGACCTCCYGGTG |
| | C (p.Leu45Pro) | | | GTGCACCTGGACTTCCGGGCG′] |
| 802 | NM_213599.2(ANO5): c.1066T > | 203859 | ANO5 | [′TGGTCAGATGATCATGTGCCCACTCBGTGAT |
| | C (p.Cys356Arg) | | | CAAGTGTGTGATTATTGGAG′] |
| 803 | NM_022370.3(ROBO3): | 64221 | ROBO3 | [′CCAGCTGGTGCAAGGTTTCCGGGTGHCTTGG |
| | c.2113T > C (p.Ser705Pro) | | | AGGGTAGCAGGCCCTGAGGG′] |
| 804 | NM_022370.3(ROBO3): c.14T > C | 64221 | ROBO3 | [′CTGGGTCGAGCCATGCTGCGCTACCYGCTGA |
| | (p.Leu5Pro) | | | AAACGCTGCTGCAGATGAAC′] |
| 805 | NM_207352.3(CYP4V2): | 285440 | CYP4V2 | [′GTATGTTTTTCTCTTCCTAAGGTAABTTTAAC |
| | c.332T > C (p.Ile111Thr) | | | TAGTTCAAAGCAAATTGAC′] |
| 806 | NM_178857.5(RP1L1): c.2878T > | 94137 | RP1L1 | [′GTCTCCAGAGGCTGTGGTCCGCGAAYGGCT |
| | C (p.Trp960Arg) | | | GGACAACATTCCAGAAGAGCC′] |
| 807 | NM_018668.4(VPS33B): c.89T > | 26276 | VPS33B | [′GCTCGAGACCAGCTCATCTATCTGCYGGAGC |
| | C (p.Leu30Pro) | | | AGGTCAGTGCTTGCCTGACG′] |
| 808 | NM_024006.5(VKORC1): | 79001 | VKORC1 | [′CGGGATTACCGCGCGCTCTGCGACGYGGGC |
| | c.134T > C (p. Val45Ala) | | | ACCGCCATCAGCTGTTCGCGC′] |
| 809 | NM_000551.3(VHL): c.334T > C | 7428 | VHL | [′TGGCACGGGCCGCCGCATCCACAGCHACCG |
| | (p.Tyr112His) | | | AGGTACGGGCCCGGCGCTTAG′] |
| 810 | NM_000551.3(VHL): c.292T > C | 7428 | VHL | [′CAACTTCGACGGCGAGCCGCAGCCCYACCC |
| | (p.Tyr98His) | | | AACGCTGCCGCCTGGCACGGG′] |
| 811 | NM_000551.3(VHL): c.188T > C | 7428 | VHL | [′GAGGCCGGGCGGCCGCGGCCCGTGCYGCGC |
| | (p.Leu63Pro) | | | TCGGTGAACTCGCGCGAGCCC′] |
| 812 | NM_000551.3(VHL): c.488T > C | 7428 | VHL | [′GTGTATACTCTGAAAGAGCGATGCCYCCAG |
| | (p.Leu163Pro) | | | GTTGTCCGGAGCCTAGTCAAG′] |
| 813 | NM_014874.3(MFN2): c.227T > C | 9927 | MFN2 | [′CCCGTTACCACAGAAGAACAGGTTCBGGAC |
| | (p.Leu76Pro) | | | GTCAAAGGTTACCTATCCAAA′] |
| 814 | NM_015046.5(SETX): c.1166T > | 23064 | SETX | [′AACATGTATGAAGAAATGGAAACATYAGCC |
| | C (p.Leu389Ser) | | | AGTGTACTTCAGTCAGATATT′] |
| 815 | NM_005609.2(PYGM): c.1187T > | 5837 | PYGM | [′TGGCCGGTGCACCTCTTGGAGACGCYGCTGC |
| | C (p.Leu396Pro) | | | CGCGGCACCTCCAGATCATC′] |
| 816 | NM_005609.2(PYGM): c.2392T > | 5837 | PYGM | [′CTTTGACCTGCAGAACCCAAGAGAGHGGAC |
| | C (p.Trp798Arg) | | | GCGGATGGTGATCCGGAACAT′] |
| 817 | NM_213653.3(HFE2): c.842T > C | 148738 | HFE2 | [′CATGTGGAGATCCAAGCTGCCTACAYTGGC |
| | (p.Ile281Thr) | | | ACAACTATAATCATTCGGCAG′] |
| 818 | NM_213653.3(HFE2): c.238T > C | 148738 | HFE2 | [′TGGAGGGGTGGGCTCTGGCGGCCTCBGTCG |
| | (p.Cys80Arg) | | | AGCCCTCCGCTCCTATGCGCT′] |
| 819 | NM_213653.3(HFE2): c.302T > C | 148738 | HFE2 | [′ACCGCCCGCACCTGCCGCGGGGACCYCGCC |
| | (p.Leu101Pro) | | | TTCCATTCGGCGGTACATGGC′] |
| 820 | NM_000045.3(ARG1): c.32T > C | 383 | ARG1 | [′GCCAAGTCCAGAACCATAGGGATTAYTGGA |
| | (p.Ile11Thr) | | | GCTCCTTTCTCAAAGGGACAG′] |
| 821 | NM_032409.2(PINK1): c.1040T > | −1 | — | [′GCCGCCATGATGCTGCTGCAGCTGCYGGAA |
| | C (p.Leu347Pro) | | | GGCGTGGACCATCTGGTTCAA′] |
| 822 | NM_153006.2(NAGS): c.1289T > | −1 | — | [′GCCAGGTACAACGCCGCCGCCATTCYGACC |
| | C (p.Leu430Pro) | | | ATGGAGCCCGTCCTGGGGGGC′] |
| 823 | NM_153006.2(NAGS): c.1450T > | −1 | — | [′CCGGGTCACCAACCCCATCAATCCCBGGTAG |
| | C (p.Trp484Arg) | | | GTCCTGCCACTCCCAGCTCT′] |
| 824 | NM_001173464.1(KIF21A): | 55605 | KIF21A | [′AGTATTTCTGATTGTCAGGCCAACAYAATGC |
| | c.3029T > C (p.Ile1010Thr) | | | AGATGGAAGAAGCAAAGGTT′] |
| 825 | NM_001173464.1(KIF21A): | 55605 | KIF21A | [′GTCAGCCCTTCAGACAGAGACTTTAYGGAA |
| | c.1067T > C (p.Met356Thr) | | | ACGTTAAACACCCTGAAATAC′] |
| 826 | NM_000434.3(NEU1): c.1088T > | 4758 | NEU1 | [′TCATGGCGGAAAGAGACAGTCCAGCYATGG |
| | C (p.Leu363Pro) | | | CCAGGCCCCAGTGGCTATTCA′] |
| 827 | NM_000434.3(NEU1): c.718T > C | 4758 | NEU1 | [′CCTCAGCGATGATCATGGTGCCTCCYGGCGC |
| | (p.Trp240Arg) | | | TACGGAAGTGGGGTCAGCGG′] |
| 828 | NM_000026.2(ADSL): c.1312T > | 158 | ADSL | [′TGATGCCTACTTCAGTCCCATTCACYCCCAG |
| | C (p.Ser438Pro) | | | TTGGATCATTTACTGGATCC′] |
| 829 | NM_000026.2(ADSL): c.674T > C | 158 | ADSL | [′TCCAAGGTAGAGCAGCTTGACAAGAYGGTG |
| | (p.Met225Thr) | | | ACAGAAAAGGCAGGATTTAAG′] |
| 830 | NM_018400.3(SCN3B): c.29T > C | 55800 | SCN3B | [′CCTGCCTTCAATAGATTGTTTCCCCYGGCTT |
| | (p.Leu10Pro) | | | CTCTCGTGCTTATCTACTGG′] |
| 831 | NM_024577.3(SH3TC2): | 79628 | SH3TC2 | [′CCTTCCTGTATCAGGAGTCCCAGGTRTATTG |
| | c.505T > C (p.Tyr169His) | | | TTTCCAGGTGTTTATCATCT′] |
| 832 | NM_000243.2(MEFV): c.2177T > | 4210 | MEFV | [′GTGGGCATCTTCGTGGACTACAGAGHTGGA |
| | C (p.Val726Ala) | | | AGCATCTCCTTTTACAATGTG′] |
| 833 | NM_000483.4(APOC2): c.142T > | −1 | — | [′GGTGAAGGAATCTCTCTCCAGTTACYGGGA |
| | C (p.Trp48Arg) | | | GTCAGCAAAGACAGCCGCCCA′] |
| 834 | NM_058172.5(ANTXR2): | 118429 | ANTXR2 | [′CTCTTCTTTCTAAAGCTTGAAAGAAYTGCTG |
| | c.566T > C (p.Ile189Thr) | | | ATTCCAAGGAGCAAGTTTTC′] |
| 835 | NM_001128085.1(ASPA): | −1 | — | [′TCAGACTTCTCTGGCTCCACTACCCYGCTAC |
| | c.454T > C (p.Cys152Arg) | | | GTTTATCTGATTGAGCATCC′] |
| 836 | NM_022464.4(SIL1): | 64374 | SIL1 | [′TGACTTATGGACGAAGAAATACAGTRCCTG |
| | c.645 + 2T > C | | | ATGGACATAATATTCAAGATC′] |
| 837 | NM_001037633.1(SIL1): | 64374 | SIL1 | [′CTGCTGGGCTCTGTCAACAGCTTGCYGAAGG |
| | c.1370T > C (p.Leu457Pro) | | | AGCTGAGATGAGGCCCCACA′] |
| 838 | NM_000391.3(TPP1): c.1093T > C | 1200 | TPP1 | [′TCTCTCAGGTGACAGTGGGGCCGGGYGTTG |
| | (p.Cys365Arg) | | | GTCTGTCTCTGGAAGACACCA′] |
| 839 | NM_182760.3(SUMF1): | 285362 | SUMF1 | [′AGTGAAGAAAGGTGGATCCTACATGYGCCA |
| | c.1006T > C (p.Cys336Arg) | | | TAGGGTAAGTCATGTCACTAA′] |
| 840 | NM_182760.3(SUMF1): c.463T > | 285362 | SUMF1 | [′CTTATAGGCTGAGAAGTTTGGCGACYCCTTT |
| | C (p.Ser155Pro) | | | GTCTTTGAAGGCATGTTGAG′] |
| 841 | NM_177986.3(DSG4): c.574T > C | −1 | — | [′TGCAGATGAAGAAAATCATCTGAATHCTAA |
| | (p.Ser192Pro) | | | AATTGCCTACAAGATCGTCTC′] |
| 842 | NM_004183.3(BEST1): c.253T > | 7439 | BEST1 | [′CCCCCGCCCCTCCTGCCCAGGCTTCYACGTG |
| | C (p.Tyr85His) | | | ACGCTGGTCGTGACCCGCTG′] |
| 843 | NM_004183.3(BEST1): c.122T > | 7439 | BEST1 | [′TATGGCGAGTTCTTAATCTTCCTGCYCTGCT |
| | C (p.Leu41Pro) | | | ACTACATCATCCGCTTTATT′] |
| 844 | NM_004183.3(BEST1): c.614T > | 7439 | BEST1 | [′CTTGGAGGTCGAATCCGGGACCCTAYCCTGC |
| | C (p.Ile205Thr) | | | TCCAGAGCCTGCTGAACGTG′] |
| 845 | NM_004183.3(BEST1): c.704T > | 7439 | BEST1 | [′TACGACTGGATTAGTATCCCACTGGYGTATA |
| | C (p.Val235Ala) | | | CACAGGTGAGGACTAGGCTG′] |
| 846 | NM_024312.4(GNPTAB): | 79158 | GNPTAB | [′TGTTTGTTGTTGTTAAAAGGATGTTYTTCGA |
| | T c.1120> C (p.Phe374Leu) | | | AATTTGAGCCACTTGCCTAC′] |
| 847 | NM_000158.3(GBE1): c.671T > C | 2632 | GBE1 | [′TATAAACATTTTACATGCAATGTACYACCAA |
| | (p.Leu224Pro) | | | GAATCAAAGGCCTTGGTAAG′] |
| 848 | NM_017890.4(VPS13B): | 157680 | VPS13B | [′CAGGTGCCATCTTCAAACAGTTCCAYTATTT |
| | c.8459T > C (p.Ile2820Thr) | | | ATGTCTGGTGCACAGTTTTG′] |
| 849 | NM_000019.3(ACAT1): c.935T > | 38 | ACAT1 | [′CTCAATGTTACACCACTGGCAAGAAYAGTA |
| | C (p.Ile312Thr) | | | GGTAAGGCCAGGCGAGGTGGC′] |
| 850 | NM_020184.3(CNNM4): | 26504 | CNNM4 | [′CTCAGTTTTCCCATTAGCAAGCTCCYGGACT |
| | c.971T > C (p.Leu324Pro) | | | TTTTTCTGGGCCAGGAGATT′] |
| 851 | NM_001171507.2(MCFD2): | 90411 | MCFD2 | [′GATGACAAGAACAATGATGGATACAYTGAC |
| | c.407T > C (p.Ile136Thr) | | | TATGCTGAATTTGCAAAATCA′] |
| 852 | NM_174936.3(PCSK9): c.646T > | 255738 | PCSK9 | [′TGTGCCCGAGGAGGACGGGACCCGCYTCCA |
| | C (p.Phe216Leu) | | | CAGACAGGTAAGCACGGCCGT′] |
| 853 | NM_000419.3(ITGA2B): | 3674 | ITGA2B | [′GACTTCCGGGACAAGCTGAGCCCCAYTGTG |
| | Tc.1787 > C (p.Ile596Thr) | | | CTCAGCCTCAATGTGTCCCTA′] |
| 854 | NM_000419.3(ITGA2B): | 3674 | ITGA2B | [′CCCTTCCAGGCCGGAGAGCTGGTGCYTGGG |
| | c.641T > C (p.Leu214Pro) | | | GCTCCTGGCGGCTATTATTTC′] |
| 855 | NM_004817.3(TJP2): c.143T > C | 9414 | TJP2 | [′TCCAAAAGAGGATTTGGAATTGCAGYGTCC |
| | (p.Val48Ala) | | | GGAGGCAGAGACAACCCCCAC′] |
| 856 | NM_173477.4(USH1G): c.143T > | 124590 | USH1G | [′GCCTACCATGGCAACCTCGAGTCGCYGCGTC |
| | C (p.Leu48Pro) | | | TCATTGTGAGCCGCGGGTGA′] |
| 857 | NM_000271.4(NPC1): c.3182T > | 4864 | NPC1 | [′GACGCTCTGAAGAAAGCCCGACTTAYAGCC |
| | C (p.Ile1061Thr) | | | AGTAATGTCACCGAAACCATG′] |
| 858 | NM_000271.4(NPC1): c.1133T > | 4864 | NPC1 | [′TTTGTCCGGGTCACAACCAATCCAGYTGACC |
| | C (p.Val378Ala) | | | TCTGGTCAGCCCCCAGCAGC′] |
| 859 | NM_000271.4(NPC1): c.337T > C | 4864 | NPC1 | [′ACTGAACCTGTTTTGTGAGCTGACAYGTAGC |
| | (p.Cys113Arg) | | | CCTCGACAGAGTCAGTTTTT′] |
| 860 | NM_000543.4(SMPD1): c.911T > | 6609 | SMPD1 | [′CGGGCCCTGACCACCGTCACAGCACYTGTG |
| | C (p.Leu304Pro) | | | AGGAAGTTCCTGGGGCCAGTG′] |
| 861 | NM_000226.3(KRT9): c.503T > C | 3857 | KRT9 | [′CTCAATTCTCGGCTGGCCTCTTACTYGGATA |
| | (p.Leu168Ser) | | | AGGTGCAGGCTCTAGAGGAG′] |
| 862 | NM_000226.3(KRT9): c.470T > C | 3857 | KRT9 | [′CTGACTGCTAATGAGAAGAGCACCANGCAG |
| | (p.Met157Thr) | | | GAACTCAATTCTCGGCTGGCC′] |
| 863 | NM_000051.3(ATM): c.7967T > C | −1 | — | [′CCAGCAGACCAGCCAATTACTAAACYTAAG |
| | (p.Leu2656Pro) | | | AATTTAGAAGATGTTGTTGTC′] |
| 864 | NM_000487.5(ARSA): c.410T > C | 410 | ARSA | [′GGGGTGGGGCCTGAGGGGGCCTTCCYGCCC |
| | (p.Leu137Pro) | | | CCCCATCAGGGCTTCCATCGA′] |
| 865 | NM_017653.3(DYM): c.1624T > | 54808 | DYM | [′AATGATGTTAGAGATCATCAACTCCYGCCTG |
| | C (p.Cys542Arg) | | | ACAAATTCCCTTCACCACAA′] |
| 866 | NM_016038.2(SBDS): | 51119 | SBDS | [′GACCAAACTGAAATCTGTAAGCAGGYGGGT |
| | c.258 + 2T > C | | | AACAGCTGCAGCATAGCTAAC′] |
| 867 | NM_001079802.1(FKTN): | 2218 | FKTN | [′ACTCATGCGATCCACTTGGTAGTCTYTCATG |
| | c.527T > C (p.Phe176Ser) | | | AGAGGAGTGGCAACTACCTC′] |
| 868 | NM_013382.5(POMT2): | 29954 | POMT2 | [′GGCAGGACTAAGGTGGCTGGACTCAYGGGA |
| | c.2242T > C (p.Trp748Arg) | | | CTTTTGAGGCCACTGCAAAGA′] |
| 869 | NM_024529.4(CDC73): c.191T > | 79577 | CDC73 | [′ACATTGGATTCCATTTTATTTCTACYTAATA |
| | C (p.Leu64Pro) | | | ACGTGCACCTTTCTCATCCT′] |
| 870 | NM_000268.3(NF2): c.1079T > C | 4771 | NF2 | [′ACGAGGGATGAGTTGGAGAGGAGGCYGCTG |
| | (p.Leu360Pro) | | | CAGATGAAAGAAGAAGCAACA′] |
| 871 | NM_000268.3(NF2): c.1604T > C | 4771 | NF2 | [′GAATACATGGAAAAGAGCAAGCATCYGCAG |
| | (p.Leu535Pro) | | | GAGCAGCTCAATGAACTCAAG′] |
| 872 | NM_000268.3(NF2): c.185T > C | 4771 | NF2 | [′CTGGGGCTCCGAGAAACCTGGTTCTYTGGAC |
| | (p.Phe62Ser) | | | TGCAGTACACAATCAAGGAC′] |
| 873 | NM_139248.2(LIPH): c.322T > C | 200879 | LIPH | [′AGACATGAACGTAGTTGTTGTTGATYGGAAT |
| | (p.Trp108Arg) | | | CGAGGAGCTACAACTTTAAT′] |
| 874 | NM_015102.4(NPHP4): | 261734 | NPHP4 | [′GCCACGCTGGGGGTCGCCGAGTTCTYTGAGT |
| | c.2972T > C (p.Phe991Ser) | | | TTGTGCTTAAGAACCCCCAC′] |
| 875 | NM_024105.3(ALG12): c.473T > | 79087 | ALG12 | [′ACCCTCCCGCACTGTCTTGCAGTCCYGCTGG |
| | C (p.Leu158Pro) | | | CCCTCGCGGCCTGGCTGCGG′] |
| 876 | NM_000280.4(PAX6): c.773T > C | 5080 | PAX6 | [′GTCCCACCTGATTTCCAGGTATGGTYTTCTA |
| | (p.Phe258Ser) | | | ATCGAAGGGCCAAATGGAGA′] |
| 877 | NM_024426.4(WT1): c.1351T > C | 7490 | WT1 | [′CTCTGTCCATTTAGGTGTGAAACCAYTCCAG |
| | (p.Phe451Leu) | | | TGTAAAACTTGTCAGCGAAA′] |
| 878 | NM_024426.4(WT1): c.1378T > C | 7490 | WT1 | [′CCAGTGTAAAACTTGTCAGCGAAAGYTCTCC |
| | (p.Phe460Leu) | | | CGGTCCGACCACCTGAAGAC′] |
| 879 | NM_005957.4(MTHFR): c.968T > | 4524 | MTHFR | [′GTGCCAGGCCTCCACTTCTACACCCYCAACC |
| | C (p.Leu323Pro) | | | GCGAGATGGCTACCACAGAG′] |
| 880 | NM_016247.3(IMPG2): c.370T > | 50939 | IMPG2 | [′TCACGCCCAGGAAGTCGATCCCAAARAGTC |
| | C (p.Phe124Leu) | | | CTGAAGGCTTCCCAGACAGCT′] |
| 881 | NM_002225.3(IVD): c.134T > C | 3712 | IVD | [′CCCGTGGACGATGCAATCAATGGGCYAAGC |
| | (p.Leu45Pro) | | | GAGGAGCAGAGGCAGGTGAGG′] |
| 882 | NM_001127328.2(ACADM): | 34 | ACADM | [′CAGTTAGCTACTGATGCTGTGCAGAYACTTG |
| | c.1136T > C (p.Ile379Thr) | | | GAGGCAATGGATTTAATACA′] |
| 883 | NM_001127328.2(ACADM): | 34 | ACADM | [′TTAGGAATTAAACATGGGCCAGCGAYGTTC |
| | c.742T > C (p.Cys248Arg) | | | AGATACTAGAGGAATTGTCTT′] |
| 884 | NM_000016.5(ACADM): | 34 | ACADM | [′GGAAATCATCCCAGTGGCTGCAGAAYATGA |
| | c.199T > C (p.Tyr67His) | | | TAAAACTGGTGAAGTAGGTAT′] |
| 885 | NM_000155.3(GALT): c.221T > C | 2592 | GALT | [′CCCCGCCATGACCCTCTCAACCCTCBGTGTC |
| | (p.Leu74Pro) | | | CTGGGGCCATCCGAGCCAAC′] |
| 886 | NM_000155.3(GALT): c.512T > C | 2592 | GALT | [′CTCCGTATCCCTATCTGATAGATCTYTGAAA |
| | (p.Phe171Ser) | | | ACAAAGGTGCCATGATGGGC′] |
| 887 | NM_000155.3(GALT): c.580T > C | 2592 | GALT | [′CCCTTGACAGGTATGGGCCAGCAGTYTCCTG |
| | (p.Phe194Leu) | | | CCAGATATTGCCCAGCGTGA′] |
| 888 | NM_000250.1(MPO): c.752T > C | 4353 | MPO | [′ACTCCGGACCAGGAGCGCTCACTCAYGTTC |
| | (p.Met251Thr) | | | ATGCAATGGGGCCAGCTGTTG′] |
| 889 | NM_020247.4(ADCK3): | 56997 | ADCK3 | [′CTCAGCCAGGAGATTCGGAACGAGGYTTGT |
| | c.1398 + 2T > C | | | CTGTGCCAGCAGACAGGTGGG′] |
| 890 | NM_000229.1(LCAT): c.508T > C | 3931 | LCAT | [′GACTGTGCGCGCCGCCCCCTATGACYGGCG |
| | (p.Trp170Arg) | | | GCTGGAGCCCGGTGAGTGTCT′] |
| 891 | NM_000229.1(LCAT): c.698T > C | 3931 | LCAT | [′CGCTTTATTGATGGCTTCATCTCTCYTGGGG |
| | (p.Leu233Pro) | | | CTCCCTGGGGTGGCTCCATC′] |
| 892 | NM_000229.1(LCAT): | 3931 | LCAT | [′CAGGTGCCCCAGACCCCAGCTGCCCYGACC |
| | c.524 − 22T > C | | | CCTTCCACCCGCTGCAGGCCA′] |
| 893 | NM_000403.3(GALE): c.548T > C | 2582 | GALE | [′CCACAGACTTGGAACGCAGTGCTGCYGCGC |
| | (p.Leu183Pro) | | | TATTTCAACCCCACAGGTGCC′] |
| 894 | NM_000527.4(LDLR): | 3949 | LDLR | [′ACAAATCTGACGAGGAAAACTGCGGYATGG |
| | c.694 + 2T > C | | | GCGGGGCCAGGGTGGGGGCGG′] |
| 895 | NM_000375.2(UROS): c.217T > C | 7390 | UROS | [′CAGAGCAGTGGAAGCAGCAGAGTTAYGTTT |
| | (p.Cys73Arg) | | | GGAGCAAAACAATAAAACTGA′] |
| 896 | NM_000375.2(UROS): | 7390 | UROS | [′GCTAACATGCTCTTTCTTGGCCTTAYCAGTG |
| | c.−26 − 177T > C | | | ACAGGGGTCTTCAGAAAGAA′] |
| 897 | NM_000372.4(TYR): c.265T > C | 7299 | TYR | [′GCCTTCCGTCTTTTATAATAGGACCYGCCAG |
| | (p.Cys89Arg) | | | TGCTCTGGCAACTTCATGGG′] |
| 898 | NM_000017.3(ACADS): c.529T > | 35 | ACADS | [′CACCGCCCGGGCCGAGGGCGACTCABGGGT |
| | C (p.Trp177Arg) | | | TCTGAATGGAACCAAAGCCTG′] |
| 899 | NM_000053.3(ATP7B): | 540 | ATP7B | [′GCGCCTCAGCCACTCACGGTTTCCARTCAGC |
| | c.3443T > C (p.Ile1148Thr) | | | ACAGAGAAGGTCTGGGGGAC′] |
| 900 | NM_000053.3(ATP7B): | 540 | ATP7B | [′GCCTTCACTGTCCTTGTCTTTCAGCYCCTCG |
| | c.2123T > C (p.Leu708Pro) | | | GTGGGTGGTACTTCTACGTT′] |
| 901 | NM_000520.4(HEXA): c.1453T > | 3073 | HEXA | [′AGCAGGGGCTGTTGCCGAAAGGCTGYGGAG |
| | C (p.Trp485Arg) | | | CAACAAGTTGACATCTGACCT′] |
| 902 | NM_000520.4(HEXA): c.632T > C | 3073 | HEXA | [′TGGCATCTGGTAGATGATCCTTCCTYCCCAT |
| | (p.Phe211Ser) | | | ATGAGAGCTTCACTTTTCCA′] |
| 903 | NM_000520.4(HEXA): c.538T > C | 3073 | HEXA | [′CTTGCTGTTGGATACATCTCGCCATYACCTG |
| | (p.Tyr180His) | | | CCACTCTCTAGCATCCTGGA′] |
| 904 | NM_016335.4(PRODH): | 5625 | PRODH | [′CTGGGCCAGGTATGCGCCCCGCACCRGCTTG |
| | c.1322T > C (p.Leu441Pro) | | | GCCCCAAAACACCAGCCCTC′] |
| 905 | NM_000152.3(GAA): c.953T > C | 2548 | GAA | [′GTGTTCCTGCTAAACAGCAATGCCAYGGGT |
| | (p.Met318Thr) | | | AAGCTGCCCGCCGCCCAGCGC′] |
| 906 | NM_012213.2(MLYCD): | 23417 | MLYCD | [′GCGGCCGGCGCCCTGGAGCGGGCCAYGGAC |
| | c.119T > C (p.Met40Thr) | | | GAGCTGCTGCGCCGCGCGGTG′] |
| 907 | NM_012464.4(TLL1): c.713T > C | 7092 | TLL1 | [′AAGAACTGTGATAAATTTGGGATTGYTGTTC |
| | (p.Val238Ala) | | | ATGAATTGGGTCATGTGATA′] |
| 908 | NM_000112.3(SLC26A2): | 1836 | SLC26A2 | [′CCTGCAGCGGCCCGGACCCGAGAGGYGAGA |
| | c.−26 + 2T > C | | | AGAGGGAAGCGGACCAGGGAA′] |
| 909 | NM_138691.2(TMC1): c.1543T > | 117531 | TMC1 | [′CCCTGCAGATGTACCTCGAGGACCTYGCTGG |
| | C (p.Cys515Arg) | | | GAAACAATGGTGGGACAGGT′] |
| 910 | NM_138694.3(PKHD1): | 5314 | PKHD1 | [′GTTGTCCTACAAGGAGAGGAGCCCAYTGAA |
| | c.10658T > C (p.Ile3553Thr) | | | ATACGCTCAGGTGTTTCCATT′] |
| 911 | NM_001034116.1(EIF2B4): | 8890 | EIF2B4 | [′TGCAGATGACCCTGATGATCTGCAAYGTAA |
| | c.1393T > C (p.Cys465Arg) | | | GCGGGGAGAACATGTTGCGCT′] |
| 912 | NM_001034116.1(EIF2B4): | 8890 | EIF2B4 | [′ATCCCTACGGTTGTTGAATCTAGTCYATGAT |
| | c.1465T > C (p.Tyr489His) | | | GTGACTCCCCCAGAGCTTGT′] |
| 913 | NM_018960.4(GNMT): c.149T > | 27232 | GNMT | [′ACCGCCGAGTACAAGGCATGGCTGCYTGGG |
| | C (p.Leu50Pro) | | | CTGCTGCGCCAGCACGGCTGC′] |
| 914 | NM_181457.3(PAX3): c.268T > C | 5077 | PAX3 | [′CTGCGTCTCCAAGATCCTGTGCAGGYACCAG |
| | (p.Tyr90His) | | | GAGACTGGCTCCATACGTCC′] |
| 915 | NM_024301.4(FKRP): c.899T > C | 79147 | FKRP | [′GAGACCACGCGCTGCTTCGGAACCGYGGTG |
| | (p.Val300Ala) | | | GGCGACACGCCCGCCTACCTC′] |
| 916 | NM_021020.3(LZTS1): c.85T > C | 11178 | LZTS1 | [′TTCGCAGTACAAGCTGCGCAAGTCCYCCCAC |
| | (p.Ser29Pro) | | | CTCAAGAAGCTCAACCGGTA′] |
| 917 | NM_005857.4(ZMPSTE24): | 10269 | ZMPSTE24 | [′TGTACTAGGCCATGAACTGGGGCACYGGAA |
| | c.1018T > C (p.Trp340Arg) | | | GTTGGGACATACAGTCAAAAA′] |
| 918 | NM_017838.3(NHP2): c.415T > C | 55651 | NHP2 | [′GCCCCATGAGGAGTACCAGGAGGCTYACGA |
| | (p.Tyr139His) | | | TGAGTGCCTGGAGGAGGTGCA′] |
| 919 | NM_000157.3(GBA): c.1448T > C | 2629 | GBA | [′GGGATGCATCAGTGCCACTGCGTCCVGGTC |
| | (p.Leu483Pro) | | | GTTCTTCTGACTGGCAACCAG′] |
| 920 | NM_001005741.2(GBA): | 2629 | GBA | [′CATCTACCACCAGACCTGGGCCAGAYACTTT |
| | c.751T > C (p.Tyr251His) | | | GTGAAGTAAGGGATCAGCAA′] |
| 921 | NM_001243133.1(NLRP3): | 114548 | NLRP3 | [′AAATTCGAAAAGGGGTATTTGATTTYTGTTG |
| | c.1718T > C (p.Phe573Ser) | | | TACGTTTCCTCTTTGGCCTG′] |
| 922 | NM_001243133.1(NLRP3): | 114548 | NLRP3 | [′GGCTTCGATGAGCTGCAAGGTGCCTYTGAC |
| | c.926T > C (p.Phe309Ser) | | | GAGCACATAGGACCGCTCTGC′] |
| 923 | NM_001243133.1(NLRP3): | 114548 | NLRP3 | [′CTCATCACCACGAGACCTGTGGCCCYGGAG |
| | c.1058T > C (p.Leu353Pro) | | | AAACTGCAGCACTTGCTGGAC′] |
| 924 | NM_057176.2(BSND): c.35T > C | 7809 | BSND | [′GAGAAGACCTTCCGGATCGGCTTCAYTGTGC |
| | (p.Ile12Thr) | | | TGGGGCTTTTCCTGCTGGCC′] |
| 925 | NM_001195794.1(CLRN1): | 7401 | CLRN1 | [′TCTGTTGCAGGCTCCTGTGGCTGTCYTGTCA |
| | c.488T > C (p.Leu163Pro) | | | TGATATTGTTTGCCTCTGAA′] |
| 926 | NM_175073.2(APTX): c.668T > C | 54840 | APTX | [′GCTGTGGCCAGGGAACACCTTGAACYCCTT |
| | (p.Leu223Pro) | | | AAGCATATGCACACTGTGGGG′] |
| 927 | NM_020365.4(EIF2B3): | 8891 | EIF2B3 | [′CCACCAGTCCATTCGTCAGCCCAGAYTGTCA |
| | c.1037T > C (p.Ile346Thr) | | | GCAAACACCTGGTAAGTGCT′] |
| 928 | NM_031433.3(MFRP): c.545T > C | −1 | — | [′ATCCAGGTGGCCACAGACCATGCAAYACAG |
| | (p.Ile182Thr) | | | CTCAAGATCGAAGCCCTCAGC′] |
| 929 | NM_016180.4(SLC45A2): | 51151 | SLC45A2 | [′AGTGCACACAACTCCACAGAGTTTCYCATCT |
| | c.1082T > C (p.Leu361Pro) | | | ACGAAAGAGGAGTCGAGGTT′] |
| 930 | NM_006005.3(WFS1): c.2486T > | 7466 | WFS1 | [′AGCCTCATCGAGTTCAGCACCATCCYGGAG |
| | C (p.Leu829Pro) | | | GGCCGCCTGGGCAGCAAGTGG′] |
| 931 | NM_024960.4(PANK2): c.178T > | 80025 | PANK2 | [′GATCAAAGGAATTTTATACATTGACYCAGTC |
| | C (p.Ser60Pro) | | | GGATTCAATGGACGGTCACA′] |
| 932 | NM_024960.4(PANK2): c.437T > | 80025 | PANK2 | [′ACCACTTTTGAAGAAGCTCTTGAAAYGGCAT |
| | C (p.Met146Thr) | | | CTCGTGGAGATAGCACCAAA′] |
| 933 | NM_020427.2(SLURP1): c.43T > | 57152 | SLURP1 | [′TGTGCAGCTGCTGCTCGTGGCAGCCYGGAG |
| | C (p.Trp15Arg) | | | CATGGGCTGTGGTGAGTGGGC′] |
| 934 | NM_020427.2(SLURP1): | 57152 | SLURP1 | [′GGTGACCCGCTCCTGCTCCAGCTCCYGTGTG |
| | c.229T > C (p.Cys77Arg) | | | GCCACCGACCCCGACAGCAT′] |
| 935 | NM_021830.4(C10orf2): | 56652 | C10orf2 | [′CTTCGGGAGGAGGTGCTAGGAGAACBGTCA |
| | c.1142T > C (p.Leu381Pro) | | | AATGTGGAGCAAGCAGCTGGC′] |
| 936 | NM_001033855.2(DCLREIC): | 64421 | DCLREIC | [′CCGGACTCTGGGATCGGCGGCGCTAYGAGT |
| | c.2T > C (p.Met1Thr) | | | TCTTTCGAGGGGCAGATGGCC′] |
| 937 | NM_153741.1(DPM3): c.254T > C | 54344 | DPM3 | [′CAGATACAGGAGGCCCGAGCCGACTYAGCC |
| | (p.Leu85Ser) | | | CGCAGGGGGCTGCGCTTCTGA′] |
| 938 | NM_000441.1(SLC26A4): | 5172 | SLC26A4 | [′GCCTTCCAAGTGCTGGTCTCACAGCYAAAG |
| | c.707T > C (p.Leu236Pro) | | | ATTGTCCTCAATGTTTCAACC′] |
| 939 | NM_000441.1(SLC26A4): | 5172 | SLC26A4 | [′TGGAAGCATCCCTAGCACAGATATCYACAA |
| | Tc.1588 > C (p.Tyr530His) | | | AAGTACCAAGAATTACAAAAA′] |
| 940 | NM_000441.1(SLC26A4): | −1 | — | [′CTTTCCCTTCGACCAAGGTGTCTGTYGCTCC |
| | c.−103T > C | | | GTAAATAAAACGTCCCACTG′] |
| 941 | NM_000441.1(SLC26A4): | 5172 | SLC26A4 | [′ATTTTTCACTTAAAAACTCACTAGGHTTTTG |
| | c.1003T > C (p.Phe335Leu) | | | CCTCCTGAACTTCCACCTGT′] |
| 942 | NM_022458.3(LMBR1): | 64327 | LMBR1 | [′AACAAAGATTTTTTTAATATGTTTCYATCCT |
| | c.423 + 4842T > C | | | GTGTCACAGTTTGAAATTGT′] |
| 943 | NM_022458.3(LMBR1): | 64327 | LMBR1 | [′AAAGCTGAGCAACATGACAGCACAAYAGAG |
| | c.423 + 4808T > C | | | GAGGAACAAAGATTTTTTTAA′] |
| 944 | NM_145693.2(LPIN1): | 23175 | LPIN1 | [′GCGACCACCGGGAGATCACGAAAGGYACCG |
| | c.1441 + 2T > C | | | CGGGCCTCGCGCGGGCGCCCT′] |
| 945 | NM_022124.5(CDH23): | 64072 | CDH23 | [′AGTGGCTGCAATGCACGCCTCACCTYCAAC |
| | c.5663T > C (p.Phe1888Ser) | | | ATCACTGCGGGCAACCGCGAG′] |
| 946 | NM_153212.2(GJB4): c.409T > C | 127534 | GJB4 | [′GTGGACGTACTTGCTGAGCCTCATCYTCAAG |
| | (p.Phe137Leu) | | | GCCGCCGTGGATGCTGGCTT′] |
| 947 | NM_021044.2(DHH): c.2T > C | 50846 | DHH | [′TTTTGGCCGAGGTCCGCTGTATCCAYGGCTC |
| | (p.Met1Thr) | | | TCCTGACCAATCTACTGCCC′] |
| 948 | NM_021044.2(DHH): c.485T > C | 50846 | DHH | [′CGCGACCGCAACAAGTATGGGTTGCYGGCG |
| | (p.Leu162Pro) | | | CGCCTCGCAGTGGAAGCCGGC′] |
| 949 | NM_020638.2(FGF23): c.287T > | 8074 | FGF23 | [′GTGATGAGCAGAAGATACCTCTGCAYGGAT |
| | C (p.Met96Thr) | | | TTCAGAGGCAACATTTTTGGA′] |
| 950 | NM_022041.3(GAN): c.1268T > C | 8139 | GAN | [′TGCTATGCAGCTATGAAAAAGAAAAYCTAC |
| | (p.Ile423Thr) | | | GCCATGGGTGGAGGCTCCTAC′] |
| 951 | NM_015665.5(AAAS): c.787T > C | 8086 | AAAS | [′CAGTGGGGGGCGGCTGCTCTCAGCTYCACC |
| | (p.Ser263Pro) | | | CGTGGATGCTGCTATCCGGGT′] |
| 952 | NM_021615.4(CHST6): c.827T > | 4166 | CHST6 | [′TACCGCCTGGTGCGCTTCGAGGACCYGGCG |
| | C (p.Leu276Pro) | | | CGGGAGCCGCTGGCAGAAATC′] |
| 953 | NM_000368.4(TSC1): c.539T > C | 7248 | TSC1 | [′GTGGCGGAAGTCTATCTCGTCCATCYCCATG |
| | (p.Leu180Pro) | | | CCAGTGTGTACGCACTCTTT′] |
| 954 | NM_020661.2(AICDA): c.238T > | 57379 | AICDA | [′CCCTGGCCGCTGCTACCGCGTCACCYGGTTC |
| | C (p.Trp80Arg) | | | ACCTCCTGGAGCCCCTGCTA′] |
| 955 | NM_020661.2(AICDA): c.317T > | 57379 | AICDA | [′CTGCGAGGGAACCCCAACCTCAGTCYGAGG |
| | C (p.Leu106Pro) | | | ATCTTCACCGCGCGCCTCTAC′] |
| 956 | NM_020661.2(AICDA): c.452T > | 57379 | AICDA | [′GATTATTTTTACTGCTGGAATACTTYTGTAG |
| | C (p.Phe151Ser) | | | AAAACCACGAAAGAACTTTC′] |
| 957 | NM_020632.2(ATP6V0A4): | 50617 | ATP6V0A4 | [′ATCATTCTGCAATTTATCCCTGAGAYGATTT |
| | c.1739T > C (p.Met580Thr) | | | TTATCCTGTGTCTGTTTGGA′] |
| 958 | NM_054027.4(ANKH): c.143T > | 56172 | ANKH | [′GCTGTCAAGGAGGATGCAGTCGAGAYGCTG |
| | C (p.Met48Thr) | | | GCCAGCTACGGGCTGGCGTAC′] |
| 959 | NM_054027.4(ANKH): c.1015T > | 56172 | ANKH | [′TGTTTGATGTCTTTCTCCCCAGCTCYGTTTCG |
| | C (p.Cys339Arg) | | | TGATGTTTTGGACACCCAA′] |
| 960 | NM_054027.4(ANKH): c.1172T > | −1 | — | [′GTGAGGGCGCATCTCACCGGGTGGCYGATG |
| | C (p.Leu391Pro) | | | ACACTGAAGAAAACCTTCGTC′] |
| 961 | NM_016373.3(WWOX): c.872T > | 51741 | WWOX | [′ACAAAAAACGACTATTGGGCGATGCYGGCT |
| | C (p.Leu291Pro) | | | TATAACAGGTCCAAGCTCTGC′] |
| 962 | NM_021102.3(SPINT2): | 10653 | SPINT2 | [′CAGCGGATTCCTCTGTCCCAAGTGGYAGGTT |
| | c.337 + 2T > C | | | CTTAAAGAGACCCGCGATGG′] |
| 963 | NM_014588.5(VSX1): c.50T > C | 30813 | VSX1 | [′GACGGGCGCACTAGCAGCAGGGCGCYGGTG |
| | (p.Leu17Pro) | | | CCTGGCGGTTCCCCTAGGGGC′] |
| 964 | NM_006946.2(SPTBN2): | 6712 | SPTBN2 | [′GAAAAGGAACTGGGACTTACCAAGCYGCTG |
| | c.758T > C (p.Leu253Pro) | | | GATCCCGAAGGTGGGGCCAGA′] |
| 965 | NM_012452.2(TNFRSF13B): | 23495 | TNFRSF13B | [′GCACCCTAAGCAATGTGCATACTTCYGTGAG |
| | c.310T > C (p.Cys104Arg) | | | AACAAGCTCAGGAGCCCAGT′] |
| 966 | NM_170784.2(MKKS): c.830T > | 8195 | MKKS | [′GAAAATGCAGTCTTGGACCAGCTGCYTAAC |
| | C (p.Leu277Pro) | | | CTAGGAAGGCAGCTAATCAGT′] |
| 967 | NM_015717.4(CD207): c.790T > | 50489 | CD207 | [′AATGGCGTGTCATCCACCCAGGACCRGTCCC |
| | C (p.Trp264Arg) | | | CTTCCATCCCTGCTTTAGTC′] |
| 968 | NM_153717.2(EVC): c.919T > C | 2121 | EVC | [′TGTGGAAAAGAAGGAGAGAGAATACYCTGA |
| | (p.Ser307Pro) | | | ACAGCTAATCGATAATGTGCG′] |
| 969 | NM_014384.2(ACAD8): c.455T > | 27034 | ACAD8 | [′AAATTTTGCCCACCGCTCTGTACCAYGGAGA |
| | C (p.Met152Thr) | | | AGTTTGCTTCCTACTGCCTC′] |
| 970 | NM_004924.4(ACTN4): c.784T > | 81 | ACTN4 | [′CGAGAAGGCCATAATGACCTATGTGYCCAG |
| | C (p.Ser262Pro) | | | CTTCTACCATGCCTTTTCAGG′] |
| 971 | NM_005097.3(LGI1): c.136T > C | 9211 | LGI1 | [′AGCGAAGCCAAAATGCCCTGCCGTGYGTAC |
| | (p.Cys46Arg) | | | TTGTACCAAAGATAATGCTTT′] |
| 972 | NM_005097.3(LGI1): c.695T > C | 9211 | LGI1 | [′GCAGAATTTGCAAAGTCTCAAGACCYGCCTT |
| | (p.Leu232Pro) | | | ATCAATCATTGTCCATAGAC′] |
| 973 | NM_006329.3(FBLN5): c.679T > | 10516 | FBLN5 | [′GCAAACCTGCGTCAACACCTACGGCYCTTTC |
| | C (p.Ser227Pro) | | | ATCTGCCGCTGTGACCCAGG′] |
| 974 | NM_006329.3(FBLN5): c.506T > | 10516 | FBLN5 | [′TTGCTTGCATTTCTGTTTCCAGACAYTGATG |
| | C (p.Ile169Thr) | | | AATGTCGCTATGGTTACTGC′] |
| 975 | NM_013339.3(ALG6): c.1432T > | 29929 | ALG6 | [′GTTTTCTGTATTGGTGTGTTTTGTAYCTTGCT |
| | C (p.Ser478Pro) | | | TGAACTTCCTGTTCTTCTT′] |
| 976 | NM_006899.3(IDH3B): c.395T > | 3420 | IDH3B | [′GAGCTAGCCTCCTATGATATGCGGCYGAGG |
| | C (p.Leu132Pro) | | | TAGGTGGTCTGGGTGGGGTGA′] |
| 977 | NM_014363.5(SACS): c.5836T > | 26278 | SACS | [′AATGGATTATACTTACTATGCAGTAYGGCCC |
| | C (p.Trp1946Arg) | | | GATCCTGATTTAGTTCATGA′] |
| 978 | NM_014363.5(SACS): c.9742T > | 26278 | SACS | [′AAGTGAGTCTTGGCTTAAGAATGCAYGGCA |
| | C (p.Trp3248Arg) | | | TTTTATTAGTGAATCTGTAAG′] |
| 979 | NM_014363.5(SACS): c.3161T > | 26278 | SACS | [′CAGATGGTATCAGCTGGTGAACTCTYTGACC |
| | C (p.Phe 1054Ser) | | | CTGATATAGAAGTACTAAAG′] |
| 980 | NM_014324.5(AMACR): | −1 | — | [′GAGCCGCTTGGGCCGGGGCAAGCGCYCGCT |
| | c.154T > C (p.Ser52Pro) | | | AGTGCTGGACCTGAAGCAGCC′] |
| 981 | NM_014324.5(AMACR): | −1 | — | [′AATCCAAGGCTTATTTATGCCAGGCYGAGTG |
| | c.320T > C (p.Leu107Pro) | | | GATTTGGCCAGTCAGGAAGC′] |
| 982 | NM_001040108.1(MLH3): | 27030 | MLH3 | [′GACAGAGGAACAAAGGAGACTCTTAYGGTC |
| | 6c.382T > C (p.Trp1276Arg) | | | AGTACCACCATGAGAATGTGA′] |
| 983 | NM_014336.4(AIPL1): c.715T > C | 23746 | AIPL1 | [′TACTCTGATCCTCAACTACTGCCAGYGCCTG |
| | (p.Cys239Arg) | | | CTGAAGAAGGAGGAGTACTA′] |
| 984 | NM_001001486.1(ATP2C1): | 27032 | ATP2C1 | [′CTCTCATTTGCTTTAGCCAGTCGTCYGGGAT |
| | c.1751T > C (p.Leu584Pro) | | | TGTATTCCAAAACTTCCCAG′] |
| 985 | NM_007194.3(CHEK2): c.470T > | 11200 | CHEK2 | [′GAAGTGGGTCCTAAAAACTCTTACAYTGCAT |
| | C (p.Ile157Thr) | | | ACATAGAAGATCACAGTGGC′] |
| 986 | NM_007255.2(B4GALT7): | 11285 | B4GALT7 | [′ACCTATGTCGGCGGCATCCTGCTGCYCTCCA |
| | c.617T > C (p.Leu206Pro) | | | AGCAGCACTACCGGCTGGTG′] |
| 987 | NM_000030.2(AGXT): c.613T > C | 189 | AGXT | [′ATCTACAGGCATCGACATCCTGTACYCGGGC |
| | (p.Ser205Pro) | | | TCCCAGAAGGCCCTGAACGC′] |
| 988 | NM_000030.2(AGXT): c.731T > C | 189 | AGXT | [′AAGCCCTTCTCCTTCTACCTGGACAYCAAGT |
| | (p.Ile244Thr) | | | GGCTGGCCAACTTCTGGGGC′] |
| 989 | NM_201253.2(CRB1): c.3122T > | 23418 | CRB1 | [′ACATGGCACGAAGTGACCCTTTCCAYGACA |
| | C (p.Met1041Thr) | | | GACCCACTGTCCCAGACCTCC′] |
| 990 | NM_201253.2(CRB1): c.3541T > | 23418 | CRB1 | [′ACACTGTGAACTCAACATCGATGAAYGCTTT |
| | C (p.Cys1181Arg) | | | TCAAACCCCTGTATCCATGG′] |
| 991 | NM_005094.3(SLC27A4): | 10999 | SLC27A4 | [′AGATAAACTGTTCTACATCTACACAYCCGGC |
| | c.739T > C (p.Ser247Pro) | | | ACCACAGGGCTGCCCAAGGC′] |
| 992 | NM_032551.4(KISS1R): c.443T > | 84634 | KISS1R | [′CGCTGGTACGTGACGGTGTTCCCGTYGCGCG |
| | C (p.Leu148Ser) | | | CCCTGCACCGCCGCACGCCC′] |
| 993 | NM_032551.4(KISS1R): c.305T > | 84634 | KISS1R | [′TGCTGCGTCCCCTTCACGGCCCTGCYGTACC |
| | C (p.Leu102Pro) | | | CGCTGCCCGGCTGGGTGCTG′] |
| 994 | NM_014270.4(SLC7A9): | 11136 | SLC7A9 | [′ATCTCCATCATCGTGGGCACCATCAYTGGCT |
| | c.131T > C (p.Ile44Thr) | | | CTGGGATCTTCGTTTCCCCC′] |
| 995 | NM_003332.3(TYROBP): c.2T > | 7305 | TYROBP | [′TGGTGTCCAGCAGCATCCGGCTTCAYGGGG |
| | C (p.Met1Thr) | | | GGACTTGAACCCTGCAGCAGG′] |
| 996 | NM_000843.3(GRM6): c.1214T > | −1 | — | [′CAGGAGGGCAAGGTGCAGTTTGTGAYTGAT |
| | C (p.Ile405Thr) | | | GCGGTGTACGCCATTGCCCAC′] |
| 997 | NM_022336.3(EDAR): c.259T > C | 10913 | EDAR | [′GTTTTCCAAAGGAGGCTACCAGATAYGCAG |
| | (p.Cys87Arg) | | | GCGTCACAAAGACTGTGAGGG′] |
| 998 | NM_003835.3(RGS9): c.895T > C | 8787 | RGS9 | [′CCCAACCAAGATGCGAGTGGAACGAYGGGC |
| | (p.Trp299Arg) | | | CTTCAACTTCAGCGAATTGAT′] |
| 999 | NM_004870.3(MPDU1): c.356T > | 9526 | MPDU1 | [′CTCCAGACGATCACCATCTGCTTCCYGGTCA |
| | C (p.Leu119Pro) | | | TGCACTACAGAGGACAGACT′] |
| 1000 | NM_004870.3(MPDU1): c.2T > C | 9526 | MPDU1 | [′ACTGGCGGAAGCTAGCTTTGCAATAYGGCG |
| | (p.Met1Thr) | | | GCCGAGGCGGACGGACCGCTT′] |
| 1001 | NM_004870.3(MPDU1): c.221T > | 9526 | MPDU1 | [′CTGGGAGCCAAGAGTGCTGAAGGGTYGAGT |
| | C (p.Leu74Ser) | | | CTCCAGTCTGTAATGCTGGAG′] |
| 1002 | NM_000334.4(SCN4A): | 6329 | SCN4A | [′ACGCTGAACATGCTCATCAAGATCAYTGGC |
| | c.2078T > C (p.Ile693Thr) | | | AATTCAGTGGGGGCGCTGGGT′] |
| 1003 | NM_006580.3(CLDN16): | 10686 | CLDN16 | [′GCTGGGTTTGGATTTCTCACCCTGCYCCTTG |
| | c.500T > C (p.Leu167Pro) | | | GTCTTGACTGCGTGAAATTC′] |
| 1004 | NM_006580.3(CLDN16): | 10686 | CLDN16 | [′ATATGCCCTGGTCTTCCAGTGAAGCYGGTGG |
| | c.434T > C (p.Leu145Pro) | | | TAACTCGAGCGTTGATGATT′] |
| 1005 | NM_003907.2(EIF2B5): | 8893 | EIF2B5 | [′CTTTCTTCCATAGCTGCTAAAGGCCYGGAGC |
| | c.1882T > C (p.Trp628Arg) | | | CCTGTTTTTAGGAACTACAT′] |
| 1006 | NM_183235.2(RAB27A): | 5873 | RAB27A | [′TATTGTGAAAACCCAGATATAGTGCYGTGTG |
| | c.389T > C (p.Leu130Pro) | | | GAAACAAGAGTGATCTGGAG′] |
| 1007 | NM_001128227.2(GNE): | 10020 | GNE | [′CCCGCCCTGCTGGGTGCTGCCAGCAYGGTTC |
| | c.2228T > C (p.Met743Thr) | | | TGGACTACACAACACGCAGG′] |
| 1008 | NM_004273.4(CHST3): c.776T > | 9469 | CHST3 | [′CGCTGCGGCCCCCTCAACGTGACGCYGGCC |
| | C (p.Leu259Pro) | | | GCAGAGGCCTGCCGCCGCAAG′] |
| 1009 | NM_004273.4(CHST3): c.920T > | 9469 | CHST3 | [′CTGGTGCGCGACCCCCGGGCCGTGCYGGCC |
| | C (p.Leu307Pro) | | | TCGCGCATGGTGGCCTTCGCC′] |
| 1010 | NM_004273.4(CHST3): c.857T > | 9469 | CHST3 | [′CGGCAGCTGGAGTTCCTGCAGCCGCYGGCC |
| | C (p.Leu286Pro) | | | GAGGACCCCCGCCTGGACCTG′] |
| 1011 | NM_172201.1(KCNE2): c.161T > | 9992 | KCNE2 | [′TTCTACTATGTCATCCTGTACCTCAYGGTGA |
| | C (p.Met54Thr) | | | TGATTGGAATGTTCTCTTTC′] |
| 1012 | NM_172201.1(KCNE2): c.170T > | 9992 | KCNE2 | [′GTCATCCTGTACCTCATGGTGATGAYTGGAA |
| | C (p.Ile57Thr) | | | TGTTCTCTTTCATCATCGTG′] |
| 1013 | NM_172201.1(KCNE2): c.178T > | 9992 | KCNE2 | [′GTACCTCATGGTGATGATTGGAATGHTCTCT |
| | C (p.Phe60Leu) | | | TTCATCATCGTGGCCATCCT′] |
| 1014 | NM_001139.2(ALOX12B) | 242 | ALOX12B | [′TCATCCTCCTTGCTCTCCCCACAGCYCCTCA |
| | c.1277T > C (p.Leu426Pro) | | | TCCCCCATACCCGATACACC′] |
| 1015 | NM_003640.3(IKBKAP): | 8518 | IKBKAP | [′ATTCGGAAGTGGTTGGACAAGTAAGYGCCA |
| | c.2204 + 6T > C | | | TTGTACTGTTTGCGACTAGTT′] |
| 1016 | NM_005413.3(SIX3): c.749T > C | 6496 | SIX3 | [′GCCACCGGCCTCACTCCCACACAAGYAGGC |
| | (p.Val250Ala) | | | AACTGGTTTAAGAACCGGCGG′] |
| 1017 | NM_004820.3(CYP7B1): | 9420 | CYP7B1 | [′TTTATTAGTGAGCTAAGAGATGATTYTTTAA |
| | c.647T > C (p.Phe216Ser) | | | AATTTGATGACAAGTTTGCA′] |
| 1018 | NM_194248.2(OTOF): c.3032T > | 9381 | OTOF | [′CTGTGTCCCACCTGGGACCAGATGCYGGTGT |
| | C (p.Leu1011Pro) | | | TCGACAACCTGGAGCTCTAT′] |
| 1019 | NM_194248.2(OTOF): c.1544T > | 9381 | OTOF | [′GACGTGGCCATCGGCACCCACTTCAYTGACC |
| | C (p.Ile515Thr) | | | TGCGCAAGATTTCTAATGAC′] |
| 1020 | NM_004737.4(LARGE): | 9215 | LARGE | [′GATGCTGGAGGCCATCTGCAAGCACYGGGA |
| | c.1483T > C (p.Trp495Arg) | | | GGGGCCCATCAGCCTGGCCCT′] |
| 1021 | NM_002420.5(TRPM1): c.296T > | 4308 | TRPM1 | [′GAGGCCTCCATGCACAGATATTAAGRGCTTG |
| | C (p.Leu99Pro) | | | GGGAGTTCCAGCTGCCAATC′] |
| 1022 | NM_004700.3(KCNQ4): c.842T > | 9132 | KCNQ4 | [′ACCTGTTTGTGTCTCCAGATTACATYGACAA |
| | C (p.Leu281Ser) | | | CCATCGGCTATGGTGACAAG′] |
| 1023 | NM_003839.3(TNFRSF11A): | 8792 | TNFRSF11A | [′ACTGAACCACCTTTTCCCCCACAGCYGTACC |
| | c.523T > C (p.Cys175Arg) | | | TTCCTTGGAAAGAGAGTAGA′] |
| 1024 | NM_030761.4(WNT4): c.35T > C | 54361 | WNT4 | [′CGCTCGTGCCTGCGTTCGCTGCGCCYCCTCG |
| | (p.Leul2Pro) | | | TCTTCGCCGTCTTCTCAGCC′] |
| 1025 | NM_000050.4(ASS1): c.535T > C | 445 | ASS1 | [′CATCCCGGTCACTCCCAAGAACCCGYGGAG |
| | (p.Trp179Arg) | | | CATGGATGAGAACCTCATGCA′] |
| 1026 | NM_002977.3(SCN9A): | −1 | — | [′ACATTGAACATGCTGATTAAGATCAYTGGTA |
| | c.2543T > C (p.Ile848Thr) | | | ACTCAGTAGGGGCTCTAGGT′] |
| 1027 | NM_002977.3(SCN9A): | −1 | — | [′TTTCTTTACCTTGGAGGTCAAGACAYCTTTA |
| | c.4382T > C (p.Ile1461Thr) | | | TGACAGAAGAACAGAAGAAA′] |
| 1028 | NM_002977.3(SCN9A): c.647T > | 6335 | SCN9A | [′GGCAATGTTTCAGCTCTTCGAACTTYCAGAG |
| | C (p.Phe216Ser) | | | TATTGAGAGCTTTGAAAACT′] |
| 1029 | NM_003880.3(WISP3): c.232T > | 8838 | WISP3 | [′AGATGGCTGTGGATGCTGTAAAATCYGTGC |
| | C (p.Cys78Arg) | | | CAAGCAACCAGGGGAAATCTG′] |
| 1030 | NM_003880.3(WISP3): c.1000T > | 8838 | WISP3 | [′TAAATGGAAGATGCTGTGGATTACAYCTTGT |
| | C (p.Ser334Pro) | | | GTGTGTCAGAGAAACTGCAG′] |
| 1031 | NM_001457.3(FLNB): c.703T > C | 2317 | FLNB | [′CGAGCACTCAGTTATGACTTACCTGYCCCAG |
| | (p.Ser235Pro) | | | TTCCCCAAAGCCAAGCTCAA′] |
| 1032- | NM_003060.3(SLC22A5): | 6584 | SLC22A5 | [′GATTTGTTACTGACAAGGCCTAGGGNAAGTT |
| 1036 | c.1051T > C (p.Trp351Arg) | | | TTCACAGCCTAAAACACAGT′, |
| | | | | ′TACAAGACCTAAGTTCCAAGAAGCARCAGTC |
| | | | | CCACAACATTCTGGATCTGC′, |
| | | | | ′GGTCACCATCATGTCCATAATGCTGYGGTAT |
| | | | | GTAAAAGAGACCTGCCTGAG′, |
| | | | | ′ATGCCTCAGACAAAATTCAAAGCCTRTGTCA |
| | | | | TCAGAGAGTGAAAAGGATAT′, |
| | | | | ′GGCTGTTGTGGGAAATATGGACTCTYGTGGG |
| | | | | GAATCTCTCCAGATCTTAAG′] |
| 1037 | NM_000369.2(TSHR): c. 1891T > | 7253 | TSHR | [′TGCCAAGAGGATGGCTGTGTTGATCYTCACC |
| | C (p.Phe631Leu) | | | GACTTCATATGCATGGCCCC′] |
| 1038 | NM_000369.2(TSHR): c. 1358T > | 7253 | TSHR | [′AAACTGAACGTCCCCCGCTTTCTCAYGTGCA |
| | C (p.Met453Thr) | | | ACCTGGCCTTTGCGGATTTC′] |
| 1039 | NM_000369.2(TSHR): c.1526T > | 7253 | TSHR | [′ACTGTCTTTGCAAGCGAGTTATCGGYGTATA |
| | C (p.Val509Ala) | | | CGCTGACGGTCATCACCCTG′] |
| 1040 | NM_000369.2(TSHR): c. 1798T > | 7253 | TSHR | [′AGTTGCCTTCGTCATCGTCTGCTGCYGTTAT |
| | C (p.Cys600Arg) | | | GTGAAGATCTACATCACAGT′] |
| 1041 | NM_000369.2(TSHR): c.1400T > | 7253 | TSHR | [′GCGGATTTCTGCATGGGGATGTACCYGCTCC |
| | C (p.Leu467Pro) | | | TCATCGCCTCTGTAGACCTC′] |
| 1042 | NM_001003722.1(GLE1): | 2733 | GLE1 | [′CAGAAATGTTTGCAACACAAGGACAYTCCT |
| | c.2051T > C (p.Ile684Thr) | | | GTCCCCAAGGGCTTTCTGACT′] |
| 1043 | NM_024009.2(GJB3): c.101T > C | 2707 | GJB3 | [′TCCGTGGTGTTCGTCTTCCGGGTGCYGGTAT |
| | (p.Leu34Pro) | | | ACGTGGTGGCTGCAGAGCGC′] |
| 1044 | NM_001080463.1(DYNC2H1): | 79659 | DYNC2H1 | [′GATTTGCTCAGAGTAGCTGATACAAYTGTAG |
| | c.3719T > C (p.Ile1240Thr) | | | CCAAAGCTGCCGACCTTAAA′] |
| 1045 | NM_018129.3(PNPO): c.784T > C | 55163 | PNPO | [′CTGGCTCTATGAGAGACTTGCACCTYAACTC |
| | (p.Ter262Gln) | | | TGGGACCTGCTGGCCCAGAG′] |
| 1046 | NM_003722.4(TP63): c.1033T > C | 8626 | TP63 | [′CCGACGCTGCTTTGAGGCCCGGATCYGTGCT |
| | (p.Cys345Arg) | | | TGCCCAGGAAGAGACAGGAA′] |
| 1047 | NM_003722.4(TP63): c.1646T > C | 8626 | TP63 | [′CCTCCGTATCCCACAGATTGCAGCAYTGTCA |
| | (p.Ile549Thr) | | | GGTGAGTCCACAGCATGTGC′] |
| 1048 | NM_003722.4(TP63): c.1738T > C | 8626 | TP63 | [′CACCATCTATCAGATTGAGCATTACBCCATG |
| | (p.Ser580Pro) | | | GATGTAAGTAACTGTTAGAC′] |
| 1049 | NM_004086.2(COCH): c.349T > C | −1 | — | [′CATCCAGTCTCAAATGCTTTCTAGAYGGTCT |
| | (p.Trp117Arg) | | | GCTTCTTTCACAGTAACTAG′] |
| 1050 | NM_004086.2(COCH): c.1535T > | −1 | — | [′GCACCTCTGGATGACCTGAAAGATAYGGCT |
| | C (p.Met512Thr) | | | TCTAAACCGAAGGAGTCTCAT′] |
| 1051 | NM_006412.3(AGPAT2): | 10555 | AGPAT2 | [′ACAGGAACAGTCACAGTGCAGGTGCYGGAA |
| | c.683T > C (p.Leu228Pro) | | | GCCATCCCCACCAGCGGCCTC′] |
| 1052 | NM_003659.3(AGPS): c.1406T > | 8540 | AGPS | [′AATCAGCTAAGTGTAGCCACATTACYGTTTG |
| | C (p.Leu469Pro) | | | AGGGGGATCGTGAGAAGGTT′] |
| 1053 | NM_004550.4(NDUFS2): | 4720 | NDUFS2 | [′GGGAGAGTTTGGGGTGTACCTGGTGYCTGA |
| | c.1237T > C (p.Ser413Pro) | | | TGGCAGCAGCCGCCCTTATCG′] |
| 1054 | NM_006892.3(DNMT3B): | 1789 | DNMT3B | [′CCAGTGGTTTGGCGATGGCAAGTTCYCCGA |
| | c.808T > C (p.Ser270Pro) | | | GGTGAGTCCGGGGAAGGGCAA′] |
| 1055 | NM_002538.3(OCLN): c.656T > C | 100506658 | OCLN | [′CAAATATATGCCCTCTGCAACCAATYTTATA |
| | (p.Phe219Ser) | | | CACCTGCAGCTACTGGACTC′] |
| 1056 | NM_001211.5(BUB1B): | −1 | — | [′AATGATGAGGCCACAGTGTCTGTTCYTGGG |
| | c.3035T > C (p.Leu1012Pro) | | | GAGCTTGCAGCAGAAATGAAT′] |
| 1057 | NM_016203.3(PRKAG2): | 51422 | PRKAG2 | [′ACAGAATCTTGCTGCTGAGAAAACAYACAA |
| | c.1459T > C (p.Tyr487His) | | | TAACCTAGATATCACGGTGAC′] |
| 1058 | NM_016203.3(PRKAG2): | 51422 | PRKAG2 | [′TAGTATTGTGGGTATTATTTCCCTGYCGGAC |
| | c.1642T > C (p.Ser548Pro) | | | ATTCTGCAAGCCCTGATCCT′] |
| 1059 | NM_001287.5(CLCN7): | 1186 | CLCN7 | [′TTCAAGCTGTTCCGGGCCCTGGGCCYGCGGC |
| | c.2297T > C (p.Leu766Pro) | | | ACCTGGTGGTGGTGGACAAC′] |
| 1060 | NM_004646.3(NPHS1): c.793T > | 4868 | NPHS1 | [′GGCAGGACAGAGCTTGGAGCTGCCGYGCGT |
| | C (p.Cys265Arg) | | | GGCCCGAGGGGGTAATCCCTT′] |
| 1061 | NM_003002.3(SDHD): c.416T > C | 6392 | SDHD | [′CTTTCAGCTTTAACCTTTGCTGGGCYTTGCT |
| | (p.Leu139Pro) | | | ATTTCAACTATCACGATGTG′] |
| 1062 | NM_001164277.1(SLC37A4): | 2542 | SLC37A4 | [′TAATGGCCTGGCCCAGGGGCTGGGCYGGCC |
| | c.352T > C (p.Trp118Arg) | | | CCCATGTGGGAAGGTCCTGCG′] |
| 1063 | NM_002546.3(TNFRSF11B): | 4982 | TNFRSF11B | [′GGAAGGGCGCTACCTTGAGATAGAGYTCTG |
| | c.349T > C (p.Phe117Leu) | | | CTTGAAACATAGGAGCTGCCC′] |
| 1064 | NM_005422.2(TECTA): | 7007 | TECTA | [′GGGCGTGAGGATCAATGACAGACAGBGCAC |
| | c.5509T> C (p.Cys1837Arg) | | | CGGCATCGAGGGGGAAGATTT′] |
| 1065 | NM_007262.4(PARK7): c.497T > | 11315 | PARK7 | [′CCTGGGACCAGCTTCGAGTTTGCGCYTGCAA |
| | C (p.Leu166Pro) | | | TTGTTGAAGCCCTGAATGGC′] |
| 1066 | NM_006009.3(TUBA1A): | 7846 | TUBA1A | [′GCTCGCCTGGACCACAAGTTTGACCYGATGT |
| | c.1190T > C (p.Leu397Pro) | | | ATGCCAAACGTGCCTTTGTT′] |
| 1067 | NM_002700.2(POU4F3): | 5459 | POU4F3 | [′CTCAAGATCCCCGGCGTGGGCTCGCYGAGC |
| | c.668T > C (p.Leu223Pro) | | | CAAAGCACCATCTGCAGGTTC′] |
| 1068 | NM_005025.4(SERPINI1): | 5274 | SERPINI1 | [′TGGTGAAGATGAAAATATTCTCTTCYCTCCA |
| | c.145T > C (p.Ser49Pro) | | | TTGAGTATTGCTCTTGCAAT′] |
| 1069 | NM_001040667.2(HSF4): | 3299 | HSF4 | [′TTCGTGCGCGGCCGCGAGCAGCTACYGGAG |
| | c.341T > C (p.Leu114Pro) | | | CGCGTGCGGCGCAAGGTGGGG′] |
| 1070 | NM_002942.4(ROBO2): | 6092 | ROBO2 | [′AATAGCAACAGTGGCCCAAATGAGAYTGGA |
| | c.2834T > C (p.Ile945Thr) | | | AATTTTGGCCGTGGAGGTAAG′] |
| 1071 | NM_000492.3(CFTR): c.3857T > | 1080 | CFTR | [′ACTTTGCAACAGTGGAGGAAAGCCTYTGGA |
| | C (p.Phe1286Ser) | | | GTGATACCACAGGTGAGCAAA′] |
| 1072 | NM_000492.3(CFTR): c.3763T > | 1080 | CFTR | [′TGGATCAGGGAAGAGTACTTTGTTAYCAGCT |
| | C (p.Ser1255Pro) | | | TTTTTGAGACTACTGAACAC′] |
| 1073 | NM_000492.3(CFTR): c.3194T > | 1080 | CFTR | [′ACAAGCTTAAAAGGACTATGGACACBTCGT |
| | C (p.Leu1065Pro) | | | GCCTTCGGACGGCAGCCTTAC′] |
| 1074 | NM_000492.3(CFTR): | 1080 | CFTR | [′TGTCTGCCATTCTTAAAAACAAAAAYGTTGT |
| | c.3469 − 20T > C | | | TATTTTTATTTCAGATGCGA′] |
| 1075 | NM_005603.4(ATP8B1): | 5205 | ATP8B1 | [′TTTTGGAGAAACACAAGTTTTCCTTYGGATG |
| | c.863T > C (p.Leu288Ser) | | | CTGATAAAATTTTGTTACGT′] |
| 1076 | NM_005603.4(ATP8B1): | 5205 | ATP8B1 | [′GAGGAGATTGAAAAAGACTTAATTGYGAGT |
| | c.2097 + 2T > C | | | TTTAGCCTTAATAACTTTTTC′] |
| 1077 | NM_005603.4(ATP8B1): | 5205 | ATP8B1 | [′ACCCTATGCCTTTGCTACAAGGAAAYTGAA |
| | c.1982T > C (p.Ile661Thr) | | | GAAAAAGAATTTACAGAATGG′] |
| 1078 | NM_005144.4(HR): | 55806 | HR | [′CGCAGCACGGAGTCTCGGCGTCCCAYGGCG |
| | c.−320T > C | | | CAACCTACGGCCTCGGCCCAG′] |
| 1079 | NM_003322.4(TULP1): | 7287 | TULP1 | [′GGTCACCCAGGCCTCAGTCAAGAACYTCCA |
| | c.1471T > C (p.Phe491Leu) | | | GATTGTCCACGCTGATGACCG′] |
| 1080 | NM_003322.4(TULP1): | 7287 | TULP1 | [′CTCCTGGGGAACCGCTTCACGGTCTYTGACA |
| | c.1145T > C (p.Phe382Ser) | | | ACGGGCAGAACCCACAGCGT′] |
| 1081 | NM_000455.4(STK11): c.200T > | 6794 | STK11 | [′TCTTACGGCAAGGTGAAGGAGGTGCYGGAC |
| | C (p.Leu67Pro) | | | TCGGAGACGCTGTGCAGGAGG′] |
| 1082 | NM_002241.4(KCNJ10): | 3766 | KCNJ10 | [′TGGCTTCCGCTACATCAGTGAGGAAYGTCCA |
| | c.418T > C (p.Cys140Arg) | | | CTGGCCATTGTGCTTCTTAT′] |
| 1083 | NM_001172567.1(MYD88): | 4615 | MYD88 | [′TCTGTAGGCCGACTGCTCGAGCTGCYTACCA |
| | c.317T > C (p.Leu106Pro) | | | AGCTGGGCCGCGACGACGTG′] |
| 1084 | NM_000466.2(PEX1): c.1991T > | 5189 | PEX1 | [′CCATCTGTTGTCCTGCTGGATGACCYTGACC |
| | C (p.Leu664Pro) | | | TCATTGCTGGACTGCCTGCT′] |
| 1085 | NM_001303.3(COX10): c.2T > C | 1352 | COX10 | [′GGAGCGGCCCCAGACTCGTAAATTAYGGCC |
| | (p.Met1Thr) | | | GCATCTCCGCACACTCTCTCC′] |
| 1086 | NM_001300.5(KLF6): c.346T > C | 1316 | KLF6 | [′TGTCAGCAGCGAATCCTCTGACAGCYCCGA |
| | (p.Ser116Pro) | | | GGAACTTTCTCCCACGGCCAA′] |
| 1087 | NM_001300.5(KLF6): c.190T > C | 1316 | KLF6 | [′CAAATTTGACAGCCAGGAAGATCTGYGGAC |
| | (p.Trp64Arg) | | | CAAAATCATTCTGGCTCGGGA′] |
| 1088 | NM_001300.5(KLF6): c.506T > C | 1316 | KLF6 | [′CTGTGGGGTTGCGTGCCCGGGGAGCYGCCC |
| | (p.Leu169Pro) | | | TCGCCAGGGAAGGTGCGCAGC′] |
| 1089 | NM_000085.4(CLCNKB): | 1188 | CLCNKB | [′CGGGTACTTCATGCCCATCTTTGTCYATGGT |
| | c.1294T > C (p.Tyr432His) | | | GAGTCTGGGGTCCTGAGGTT′] |
| 1090 | NM_000214.2(JAG1): c.110T > C | 182 | JAG1 | [′TGTGGGGCCTCGGGTCAGTTCGAGTYGGAG |
| | (p.Leu37Ser) | | | ATCCTGTCCATGCAGAACGTG′] |
| 1091 | NM_003865.2(HESX1): c.77T > C | 8820 | HESX1 | [′ACTTGCTCCTTTTCAATTGAGAGAAYCTTAG |
| | (p.Ile26Thr) | | | GACTGGACCAGAAGAAAGAC′] |
| 1092 | NM_003865.2(HESX1): | 8820 | HESX1 | [′TCATTATTGGGTGAAAAAACTTCCCDCCTGG |
| | c.357 + 2T > C | | | TTTTGAGTAAAAGCAGTTCT′] |
| 1093 | NM_002618.3(PEX13): c.977T > | 5194 | PEX13 | [′CTTGATGGCCAAACAACAGGACTTAYACCT |
| | C (p.Ile326Thr) | | | GCGAATTATGTCAAAATTCTT′] |
| 1094 | NM_000303.2(PMM2): c.395T > | 5373 | PMM2 | [′AATGGGATGTTAAACGTGTCCCCTAYTGGA |
| | C (p.Ile132Thr) | | | AGAAGCTGCAGCCAAGAAGAA′] |
| 1095 | NM_000303.2(PMM2): c.131T > | 5373 | PMM2 | [′AGGCAGAAGATCAAAATCGGAGTGGYAGGC |
| | C (p.Val44Ala) | | | GGATCGGACTTTGAGAAAGTG′] |
| 1096 | NM_000104.3(CYP1B1): c.2T > C | 1545 | CYP1B1 | [′CGCCTTCTCCTCTCTGTCCCCAGCAYGGGCA |
| | (p.Met1Thr) | | | CCAGCCTCAGCCCGAACGAC′] |
| 1097 | NM_032977.3(CASP10): | 843 | CASP10 | [′AAAGACTCGCTTCCCAAAACTGAAAYGGTG |
| | c.440T > C (p.Met147Thr) | | | AGTGGGTCATACAGAATGGGT′] |
| 1098 | NM_003999.2(OSMR): c.2072T > | 9180 | OSMR | [′GGTTCAGAATGTTGCAAATACAAAAYTGAC |
| | C (p.Ile691Thr) | | | AACCCGGAAGAAAAGGCATTG′] |
| 1099 | NM_000314.6(PTEN): c.370T > C | 5728 | PTEN | [′TGACAATCATGTTGCAGCAATTCACBGTAAA |
| | (p.Cys124Arg) | | | GCTGGAAAGGGACGAACTGG′] |
| 1100 | NM_000314.6(PTEN): c.209T > C | 5728 | PTEN | [′AAAAACCATTACAAGATATACAATCYGTAA |
| | (p.Leu70Pro) | | | GTATGTTTTCTTATTTGTATG′] |
| 1101 | NM_000314.6(PTEN): c.335T > C | 5728 | PTEN | [′TTTTGTGAAGATCTTGACCAATGGCYAAGTG |
| | (p.Leu112Pro) | | | AAGATGACAATCATGTTGCA′] |
| 1102 | NM_000314.6(PTEN): c.722T > C | 5728 | PTEN | [′CGACGGGAAGACAAGTTCATGTACTYTGAG |
| | (p.Phe241Ser) | | | TTCCCTCAGCCGTTACCTGTG′] |
| 1103 | NM_006949.3(STXBP2): | 6813 | STXBP2 | [′TTGGCCCACGCCGTCCTGGCCAAGCHGAAC |
| | c.626T > C (p.Leu209Pro) | | | GCCTTCAAGGCAGACACTCCC′] |
| 1104 | NM_000358.2(TGFBI): c.1619T > | 7045 | TGFBI | [′AACCGGGAAGGAGTCTACACAGTCTYTGCT |
| | C (p.Phe540Ser) | | | CCCACAAATGAAGCCTTCCGA′] |
| 1105 | NM_000350.2(ABCA4): | 24 | ABCA4 | [′CAGCTCACCCAACGTGCCCTCTCTCYACTGG |
| | c.1622T > C (p.Leu541Pro) | | | AGGAAAACATGTTCTGGGCC′] |
| 1106 | NM_000350.2(ABCA4): | 24 | ABCA4 | [′GGAAATAAAACTGACATCTTAAGGCYACAT |
| | c.5819T > C (p.Leu1940Pro) | | | GAACTAACCAAGGTAAGGGAA′] |
| 1107 | NM_000860.5(HPGD): c.577T > C | 3248 | HPGD | [′CTTTGTTAACACAGCCATCCTTGAAYCAATT |
| | (p.Ser193Pro) | | | GAAAAAGAAGAAAACATGGG′] |
| 1108 | NM_000223.3(KRT12): c.386T > | 3859 | KRT12 | [′CTTTCTGGATCAGAAAAAGAAACTAYGCAA |
| | C (p.Met129Thr) | | | AATCTTAATGATAGATTAGCT′] |
| 1109 | NM_000503.5(EYA1): c. 1459T > | 2138 | EYA1 | [′GTTGACACTGGCCCTGAAAGCACTCYCGCTC |
| | C (p.Ser487Pro) | | | ATTCACTCCCGGTGAGGCTC′] |
| 1110 | NM_000261.1(MYOC): | 4653 | MYOC | [′TGCCTTCATCATCTGTGGCACCTTGYACACC |
| | c.1309T > C (p.Tyr437His) | | | GTCAGCAGCTACACCTCAGC′] |
| 1111 | NM_000261.1(MYOC): | 4653 | MYOC | [′GTCAGTCGCCAATGCCTTCATCATCYGTGGC |
| | c.1297T > C (p.Cys433Arg) | | | ACCTTGTACACCGTCAGCAG′] |
| 1112 | NM_130838.1(UBE3A): c.389T > | 7337 | UBE3A | [′GATTATTCCCCTTTAATCCGTGTTAYTGGAA |
| | C (p.Ile130Thr) | | | GAGTTTTTTCTAGTGCTGAG′] |
| 1113 | NM_000474.3(TWIST1): | 7291 | TWIST1 | [′TCGCTGAACGAGGCGTTCGCCGCGCYGCGG |
| | c.392T > C (p.Leu131Pro) | | | AAGATCATCCCCACGCTGCCC′] |
| 1114 | NM_000192.3(TBX5): c.161T > C | 6910 | TBX5 | [′TCCTTCTTGCAGGGCATGGAGGGAAYCAAA |
| | (p.Ile54Thr) | | | GTGTTTCTCCATGAAAGAGAA′] |
| 1115 | NM_002905.3(RDH5): c.841T > C | −1 | — | [′GACTGCTCGACACCCCCGAACCCGCBACAG |
| | (p.Tyr281His) | | | CCCAGGTTGGGATGCCAAGCT′] |
| 1116 | NM_001089.2(ABCA3): c.302T > | 21 | ABCA3 | [′GTCACTGAGACAGTGCGCAGGGCACYTGTG |
| | C (p.Leu101Pro) | | | ATCAACATGCGAGGTGAGACA′] |
| 1117 | NM_001089.2(ABCA3): | 21 | ABCA3 | [′ATGGACCCCGTGGCCCGGCGCCTGCYTTGG |
| | c.4658T > C (p.Leu1553Pro) | | | GACACCGTGGCACGAGCCCGA′] |
| 1118 | NM_001089.2(ABCA3): c.977T > | 21 | ABCA3 | [′ATCGCCGCCTCCTTCATGACCCTGCYCTTCT |
| | C (p.Leu326Pro) | | | GTGTCAAGGTGAGCATGGCG′] |
| 1119 | NM_005535.2(IL12RB1): | 3594 | IL12RB1 | [′CTGCCTCTCCCCAGAGTCCTGCCTCYGCCCC |
| | c.592T > C (p.Cys198Arg) | | | CTGGAGATGAATGTGGCCCA′] |
| 1120 | NM_005055.4(RAPSN): c.41T > C | 5913 | RAPSN | [′ACCAAGCAGCAGATCGAGAAGGGGCYCCAG |
| | (p.Leu14Pro) | | | CTGTACCAGTCCAACCAGACA′] |
| 1121 | NM_005055.4(RAPSN): c.848T > | 5913 | RAPSN | [′ATCATGACCGAGATCGGAAACCGCCYGGGG |
| | C (p.Leu283Pro) | | | CAGGTGCAGGCGCTGCTGGGT′] |
| 1122 | NM_005055.4(RAPSN): c.416T > | 5913 | RAPSN | [′AATGCCTTCCTGGGCCTCAGCGTCTYCCAGA |
| | C (p.Phe139Ser) | | | AGGCCCTGGAGAGCTTCGAG′] |
| 1123 | NM_005570.3(LMAN1): c.2T > C | 3998 | LMAN1 | [′CTCCTCCGCGTTCCAGAATCCAAGAYGGCG |
| | (p.Met1Thr) | | | GGATCCAGGCAAAGGGGTCTC′] |
| 1124 | NM_000430.3(PAFAH1B1): | 5048 | PAFAH1B1 | [′CAGCGGCAAGCTTCTGGCTTCCTGTYCTGCA |
| | 5c.50T > C (p.Ser169Pro) | | | GATATGACCATTAAACTATG′] |
| 1125 | NM_000430.3(PAFAH1B1): | 5048 | PAFAH1B1 | [′GGCTATGAAGAGGCATATTCAGTTTYTAAA |
| | c.92T > C (p.Phe31Ser) | | | AAGGAAGCTGAATTAGATGTG′] |
| 1126 | NM_006261.4(PROP1): c.263T > | 5626 | PROP1 | [′CAGTTGGAACAGCTGGAGTCAGCCTYTGGG |
| | C (p.Phe88Ser) | | | AGGAACCAGTACCCCGACATC′] |
| 1127 | NM_175929.2(FGF14): c.449T > | 2259 | FGF14 | [′GAACTTTTTACCCCTGAATGCAAGTYTAAAG |
| | C (p.Phe150Ser) | | | AATCTGTTTTTGAAAATTAT′] |
| 1128 | NM_004970.2(IGFALS): | 3483 | IGFALS | [′GTGGCTGGAGGGTAACCCCTGGGACYGTGG |
| | c.1618T > C (p.Cys540Arg) | | | CTGCCCTCTCAAGGCGCTGCG′] |
| 1129 | NM_005379.3(MYO1A): | 4640 | MYO1A | [′CCCTTGCCTGTTCCGTCCCTAGACTYCTTCTC |
| | c.2728T > C (p.Ser910Pro) | | | GGATTCTCCTCCTGACCAA′] |
| 1130 | NM_006302.2(MOGS): c.1954T > | 7841 | MOGS | [′GCACTGGGCCCCAGAGCTAGGAGTCYTTGC |
| | C (p.Phe652Leu) | | | AGACTTTGGGAACCACACAAA′] |
| 1131 | NM_001009944.2(PKD1): | 5310 | PKD1 | [′TACGTGCCCACCAACGGCTCAGCCTYGGTGC |
| | c.2534T > C (p.Leu845Ser) | | | TCCAGGTGGACTCTGGTGCC′] |
| 1132 | NM_004329.2(BMPR1A): | 657 | BMPR1A | [′AGCCCAGCTACGCCGGACAATAGAAYGTTG |
| | c.370T > C (p.Cys124Arg) | | | TCGGACCAATTTATGTAACCA′] |
| 1133 | NM_004329.2(BMPR1A): | 657 | BMPR1A | [′CCGAGTGATCCGTCATACGAAGATAYGCGT |
| | c.1409T > C (p.Met470Thr) | | | GAGGTTGTGTGTGTCAAACGT′] |
| 1134 | NM_000452.2(SLC10A2): | 6555 | SLC10A2 | [′GTGGCGGGTTACTCCCTGGGGTTTCYTCTGG |
| | c.728T > C (p.Leu243Pro) | | | CTAGAATTGCTGGTCTACCC′] |
| 1135 | NM_030662.3(MAP2K2): | 5605 | MAP2K2 | [′CAACTCGCCGTACATCGTGGGCTTCYACGGG |
| | c.400T > C (p.Tyr134His) | | | GCCTTCTACAGTGACGGGGA′] |
| 1136 | NM_033337.2(CAV3): c.260T > C | 859 | CAV3 | [′CTGCTGGGCGTCCCACTGGCCCTGCHCTGGG |
| | (p.Leu87Pro) | | | GCTTCCTGTTCGCCTGCATC′] |
| 1137 | NM_000388.3(CASR): c.2417T > | 846 | CASR | [′CCGGAGAACTTCAATGAAGCCAAGTHCATC |
| | C (p.Phe806Ser) | | | ACCTTCAGCATGCTCATCTTC′] |
| 1138 | NM_000388.3(CASR): c.382T > C | 846 | CASR | [′AATTGATTCTTTGAACCTTGATGAGYTCTGC |
| | (p.Phe128Leu) | | | AACTGCTCAGAGCACATTCC′] |
| 1139 | NM_000388.3(CASR): c.1835T > | 846 | CASR | [′GAGTTTCTGTCGTGGACGGAGCCCTYTGGGA |
| | C (p.Phe612Ser) | | | TCGCACTCACCCTCTTTGCC′] |
| 1140 | NM_000388.3(CASR): c.2641T > | 846 | CASR | [′GCGTTGCAGCACCGCAGCTCACGCTYTCAA |
| | C (p.Phe881Leu) | | | GGTGGCTGCCCGGGCCACGCT′] |
| 1141 | NM_000388.3(CASR): c.374T > C | 846 | CASR | [′CAAAACAAAATTGATTCTTTGAACCYTGATG |
| | (p.Leul25Pro) | | | AGTTCTGCAACTGCTCAGAG′] |
| 1142 | NM_000388.3(CASR): c.2362T > | 846 | CASR | [′CACCTGCCTGCTGGCTGCCATCTGCYTCTTC |
| | C (p.Phe788Leu) | | | TTTGCCTTCAAGTCCCGGAA′] |
| 1143 | NM_000388.3(CASR): c.38T > C | 846 | CASR | [′AGCTGCTGCTGGGTCCTCTTGGCACYCACCT |
| | (p.Leu13Pro) | | | GGCACACCTCTGCCTACGGG′] |
| 1144 | NM_030653.3(DDX11): | 1663 | DDX11 | [′CTGGCATATTCCAGGTGCATCCAGGYGCGG |
| | c.2271 + 2T > C | | | GCGTCATGCTGGGCTTGGGTC′] |
| 1145 | NM_001001557.2(GDF6): | 392255 | GDF6 | [′TTCACCAGATCCCAGCGCAAGAACCYGTTC |
| | c.866T > C (p.Leu289Pro) | | | GCAGAGATGCGCGAGCAGCTG′] |
| 1146 | NM_000557.4(GDF5): c.1322T > | −1 | — | [′TGCGAGTTCCCATTGCGCTCCCACCYGGAGC |
| | C (p.Leu441Pro) | | | CCACGAATCATGCAGTCATC′] |
| 1147 | NM_000392.4(ABCC2): | 1244 | ABCC2 | [′TGATTCGGAAGCCACAGTCCGAGAGYGAGT |
| | c.1967 + 2T > C | | | TGCCTTCTTTCCATCCTAATG′] |
| 1148 | NM_000396.3(CTSK): c.926T > C | 1513 | CTSK | [′AACTGGGGAAACAAAGGATATATCCYCATG |
| | (p.Leu309Pro) | | | GCTCGAAATAAGAACAACGCC′] |
| 1149 | NM_000304.3(PMP22): c.47T > C | 5376 | PMP22 | [′ATCATCGTCCTCCACGTCGCGGTGCYGGTGC |
| | (p.Leul6Pro) | | | TGCTGTTCGTCTCCACGATC′] |
| 1150 | NM_000304.3(PMP22): c.82T > C | 5376 | PMP22 | [′ATATCTATCTGATTCTCTCTAGCAAYGGATC |
| | (p.Trp28Arg) | | | GTGGGCAATGGACACGCAAC′] |
| 1151 | NM_001453.2(FOXC1): c.335T > | 2296 | FOXC1 | [′ATCTACCAGTTCATCATGGACCGCTHCCCCT |
| | C (p.Phe112Ser) | | | TCTACCGGGACAACAAGCAG′] |
| 1152 | NM_001451.2(FOXF1): | 2294 | FOXF1 | [′CCAAGACATCAAGCCTTGCGTGATGYGAGG |
| | c.1138T > C (p.Ter380Arg) | | | CTGCCGCCGCAGGCCCTCCTG′] |
| 1153 | NM_006432.3(NPC2): c.199T > C | 10577 | NPC2 | [′CTCTTTTTTTCTCTTAGATATTCAGYCTAAAA |
| | (p.Ser67Pro) | | | GCAGCAAGGCCGTGGTGCA′] |
| 1154 | NM_001127221.1(CACNA1A): | 773 | CACNA1A | [′CTGAATGTGTTCTTGGCCATCGCTGYGGACA |
| | c.2141T > C (p.Val714Ala) | | | ATCTGGCCAACGCCCAGGAG′] |
| 1155 | NM_001127221.1(CACNA1A): | 773 | CACNA1A | [′GGGTACCGCATGGAGATGTCCATTTYCTACG |
| | c.4469T > C (p.Phe1490Ser) | | | TCGTCTACTTTGTGGTGTTC′] |
| 1156 | NM_001127221.1(CACNA1A): | 773 | CACNA1A | [′ATGCTCTTCTTCATCTATGCCATCAYTGGGA |
| | c.5126T > C (p.Ile1709Thr) | | | TGCAGGTGAGTGTCGTGTCC′] |
| 1157 | NM_000901.4(NR3C2): | 4306 | NR3C2 | [′CAGAGCTGGCAGAGGTTCTACCAACYGACC |
| | c.2771T > C (p.Leu924Pro) | | | AAGCTGCTGGACTCCATGCAT′] |
| 1158 | NM_000901.4(NR3C2): | 4306 | NR3C2 | [′GTGGAGTCGGGGAACGCCAAGCCGCYCTAC |
| | c.2936T > C (p.Leu979Pro) | | | TTCCACCGGAAGTGACTGCCC′] |
| 1159 | NM_000339.2(SLC12A3): | 6559 | SLC12A3 | [′CTCACCCTCCTCATTCCCTATCTCCYTGGCC |
| | c.2576T > C (p.Leu859Pro) | | | GCAAGAGGAGGTGGAGCAAA′] |
| 1160 | NM_000339.2(SLC12A3): | 6559 | SLC12A3 | [′CTGGGGTGCCTGCGAGGGGCTGGCCYGCAG |
| | c.1261T > C (p.Cys421Arg) | | | CTATGGCTGGAACTTCACCGA′] |
| 1161 | NM_000339.2(SLC12A3): | 6559 | SLC12A3 | [′TCGGTACAGGCTGGCTCCTACAACCYGGCCC |
| | c.1868T > C (p.Leu623Pro) | | | TCAGCTACTCGGTGGGCCTC′] |
| 1162 | NM_000163.4(GHR): c.341T > C | 2690 | GHR | [′TCTGCTGGGGAAAACAGCTGTTACTYTAATT |
| | (p.Phe114Ser) | | | CATCGTTTACCTCCATCTGG′] |
| 1163 | NM_000163.4(GHR): c.512T > C | 2690 | GHR | [′AGTTTAACTGGGATTCATGCAGATAYCCAA |
| | (p.Ile171Thr) | | | GTGAGATGGGAAGCACCACGC′] |
| 1164 | NM_000525.3(KCNJ11): | 3767 | KCNJ11 | [′ACTGAGGAGTGCCCACTGGCCATCCYGATC |
| | c.440T > C (p.Leu147Pro) | | | CTCATCGTGCAGAACATCGTG′] |
| 1165 | NM_000525.3(KCNJ11): | 3767 | KCNJ11 | [′CCGCTTTGTGTCCAAGAAAGGCAACYGCAA |
| | c.124T > C (p.Cys42Arg) | | | CGTGGCCCACAAGAACATCCG′] |
| 1166 | NM_001122764.1(PPOX): | 5498 | PPOX | [′ACCGTGGTCGTGCTGGGCGGAGGCAYCAGC |
| | c.35T > C (p.Ile12Thr) | | | GGCTTGGCCGCCAGTTACCAC′] |
| 1167 | NM_000182.4(HADHA): | 3030 | HADHA | [′AAAGAATCAAAGGCCTTGATGGGACYCTAC |
| | c.1025T > C (p.Leu342Pro) | | | CATGGTCAGGTCCTGTGCAAG′] |
| 1168 | NM_003476.4(CSRP3): c.131T > | 8048 | CSRP3 | [′CTGGCAGTGGCCTGCAGGAAGGCTCYTGAC |
| | C (p.Leu44Pro) | | | AGCACGACAGTCGCGGCTCAT′] |
| 1169 | NM_001204.6(BMPR2): c.367T > | 659 | BMPR2 | [′TTTCTGCTGTTGTAGCACAGATTTAHGTAAT |
| | C (p.Cys123Arg) | | | GTCAACTTTACTGAGAATTT′] |
| 1170 | NM_000336.2(SCNN1B): | 6338 | SCNN1B | [′CATCCCAGGCACCCCGCCCCCCAACYATGA |
| | c.1858T > C (p.Tyr620His) | | | CTCCCTGCGTCTGCAGCCGCT′] |
| 1171 | NM_002181.3(IHH): c.569T > C | 3549 | IHH | [′TCAAAGGCCCACGTGCATTGCTCCGYCAAGT |
| | (p.Val190Ala) | | | CCGGTGAGCCGCCGCCGGGG′] |
| 1172 | NM_000193.3(SHH): c.349T > C | 6469 | SHH | [′TTTGGCCATCTCGGTGATGAACCAGBGGCCA |
| | (p.Trp117Arg) | | | GGAGTGAAACTGCGGGTGAC′] |
| 1173 | NM_000193.3(SHH): c.995T > C | 6469 | SHH | [′GACCGCCGGCTCCTGCCCGCCGCTGYGCAC |
| | (p.Val332Ala) | | | AGCGTGACCCTAAGCGAGGAG′] |
| 1174 | NM_000179.2(MSH6): c.2633T > | 2956 | MSH6 | [′AAAATTATAGGGATCATGGAAGAAGBTGCT |
| | C (p.Val878Ala) | | | GATGGTTTTAAGTCTAAAATC′] |
| 1175 | NM_000098.2(CPT2): c.1342T > | 1376 | CPT2 | [′AACCCTCACTATTGACTGCGTCCAGYTTCAG |
| | C (p.Phe448Leu) | | | AGAGGAGGCAAAGAATTCCT′] |
| 1176 | NM_007315.3(STAT1): | 6772 | STAT1 | [′GGAACTGGATATATCAAGACTGAGTYGATT |
| | c.2117T > C (p.Leu706Ser) | | | TCTGTGTCTGAAGTGTAAGTG′] |
| 1177 | NM_007315.3(STAT1): | 6772 | STAT1 | [′AAGGACCAGCAGCCGGGGACCTTCCYGCTG |
| | c.1799T > C (p.Leu600Pro) | | | CGGTTCAGTGAGAGCTCCCGG′] |
| 1178 | NM_024420.2(PLA2G4A): | 5321 | PLA2G4A | [′AGGGACAGCAACATTTACTGTATCTYCTATG |
| | c.331T > C (p.Ser111Pro) | | | AAGGTGGGAGAAAAGAAAGA′] |
| 1179 | NM_000352.4(ABCC8): c.394T > | 6833 | ABCC8 | [′CTATCACAACATCGAGACTTCCAACBTCCCC |
| | C (p.Phe132Leu) | | | AAGCTGCTAATTGGTAGGTG′] |
| 1180 | NM_033163.3(FGF8): c.118T > C | 2253 | FGF8 | [′GCTGGGCAGGGAGCTCGCTTCCCTGYTCCGG |
| | (p.Phe40Leu) | | | GCTGGCCGGGAGCCCCAGGG′] |
| 1181 | NM_153767.3(KCNJ1): | 3758 | KCNJ1 | [′AACATCTTTCTCATTATAAAGGCACRTGGCA |
| | c.1013T > C (p.Met338Thr) | | | CAGTGAGGGGTCTCCACTTC′] |
| 1182 | NM_000095.2(COMP): | 1311 | COMP | [′AACCCACCCTGTCATCCAGGACAACYGCCC |
| | c.982T > C (p.Cys328Arg) | | | GCTGGTGCGGAACCCAGACCA′] |
| 1183 | NM_000095.2(COMP): c.1042T > | 1311 | COMP | [′GGACGAGGACAAGTGGGGCGATGCGYGCGA |
| | C (p.Cys348Arg) | | | CAACTGCCGGTCCCAGAAGAA′] |
| 1184 | NM_002047.2(GARS): c.548T > C | 2617 | GARS | [′ATCCTGGAGATCGATTGCACCATGCYCACCC |
| | (p.Leu183Pro) | | | CTGAGCCAGTTTTAAAGTGA′] |
| 1185 | NM_000435.2(NOTCH3): | 4854 | NOTCH3 | [′CCTCGACCGCATAGGCCAGTTCACCYGTATC |
| | c.1363T > C (p.Cys455Arg) | | | TGTATGGCAGGTGGGTGGTG′] |
| 1186 | NM_001166107.1(HMGCS2): | 3158 | HMGCS2 | [′CTGCTACGGTGGTACTGCCTCCCTCYTCAAT |
| | c.520T > C (p.Phe174Leu) | | | GCTGCCAACTGGATGGAGTC′] |
| 1187 | NM_001038.5(SCNN1A): | 6337 | SCNN1A | [′CCAGCTCTCTGCTGGTTACTCACGAYGGCCC |
| | c.1477T > C (p.Trp493Arg) | | | TCGGTGACATCCCAGGTAGA′] |
| 1188 | NM_000161.2(GCH1): c.662T > C | 2643 | GCH1 | [′ATGGTAATGCGAGGTGTACAGAAAAYGAAC |
| | (p.Met221Thr) | | | AGCAAAACTGTGACCAGCACA′] |
| 1189 | NM_000059.3(BRCA2): | 675 | BRCA2 | [′CGCGTCTTTCCACAGCCAGGCAGTCYGTATC |
| | c.7529T > C (p.Leu2510Pro) | | | TTGCAAAAACATCCACTCTG′] |
| 1190 | NM_000180.3(GUCY2D): | 3000 | GUCY2D | [′GGAGACAGGGTTTGGCTGAAGAAATYCCCA |
| | c.1694T > C (p.Phe565Ser) | | | GGGGATCAGCACATAGCTATC′] |
| 1191 | NM_000180.3(GUCY2D): | 3000 | GUCY2D | [′AATGGGCAGCGACACGCGGCAGAGAYCGCC |
| | c.2846T > C (p.Ile949Thr) | | | AACATGTCACTGGACATCCTC′] |
| 1192 | NM_198056.2(SCN5A): | 6331 | SCN5A | [′CTGTCACGATTTGAGGGCATGAGGGYAAGA |
| | c.3963 + 2T > C | | | GAGGTGGCTGCCTTCCCACCA′] |
| 1193 | NM_000335.4(SCN5A): | 6331 | SCN5A | [′GAGTGAGGACGACTTCGATATGTTCYATGA |
| | c.5380T > C (p.Tyr1794His) | | | GATCTGGGAGAAATTTGACCC′] |
| 1194 | NM_000023.2(SGCA): c.524T > C | 6442 | SGCA | [′CCCGGAGAGCTTCAGCTGCTCAACGYCACCT |
| | (p.Val175Ala) | | | CTGCCTTGGACCGTGGGGGC′] |
| 1195 | NM_002427.3(MMP13): c.224T > | 4322 | MMP13 | [′AGGCTCCGAGAAATGCAGTCTTTCTYCGGCT |
| | C (p.Phe75Ser) | | | TAGAGGTGACTGGCAAACTT′] |
| 1196 | NM_002427.3(MMP13): c.221T > | 4322 | MMP13 | [′GAGAGGCTCCGAGAAATGCAGTCTTYCTTC |
| | C (p.Phe74Ser) | | | GGCTTAGAGGTGACTGGCAAA′] |
| 1197 | NM_002427.3(MMP13): c.272T > | 4322 | MMP13 | [′CTTGACGATAACACCTTAGATGTCAYGAAA |
| | C (p.Met91Thr) | | | AAGCCAAGATGCGGGGTTCCT′] |
| 1198 | NM_004525.2(LRP2): c.7564T > | 4036 | LRP2 | [′CTCCTTTTGTATGACTAGGTACCTGYACTGG |
| | C (p.Tyr2522His) | | | GCTGACTGGGATACACATGC′] |
| 1199 | NM_000211.4(ITGB2): c.446T > | 3689 | ITGB2 | [′GATGACCTCAGGAATGTCAAGAAGCYAGGT |
| | C (p.Leu149Pro) | | | GGCGACCTGCTCCGGGCCCTC′] |
| 1200 | NM_000211.4(ITGB2): c.412T > | 3689 | ITGB2 | [′GTACTATCTGATGGACCTCTCCTACYCCATG |
| | C (p.Ser138Pro) | | | CTTGATGACCTCAGGAATGT′] |
| 1201 | NM_005502.3(ABCA1): | 19 | ABCA1 | [′CAAAATCAAGAAGATGCTGCCTGTGYGTCC |
| | c.4429T > C (p.Cys1477Arg) | | | CCCAGGGGCAGGGGGGCTGCC′] |
| 1202 | NM_005502.3(ABCA1): | 19 | ABCA1 | [′TTGACTGGGAGAGAACACGTGGAGTYCTTT |
| | c.6026T > C (p.Phe2009Ser) | | | GCCCTTTTGAGAGGAGTCCCA′] |
| 1203 | NM_130439.3(MXI1): | 4601 | MXI1 | [′AACAAAGCCAAAGCACACATCAAGGYGAGA |
| | c.552 + 2T> C | | | ATTTTTACTTTCAGATTTGCA′] |
| 1204 | m.5874T > C | 4579 | MT-TY | [′GTCTTTAGATTTACAGTCCAATGCTYCACTC |
| | | | | AGCCATTTTACCTCACCCCC′] |
| 1205 | m.7512T > C | 4574 | MT-TS1 | [′CCAACCCCATGGCCTCCATGACTTTYTCAAA |
| | | | | AAGGTATTAGAAAAACCATT′] |
| 1206 | m.7510T > C | 4574 | MT-TS1 | [′AGCCAACCCCATGGCCTCCATGACTYTTTCA |
| | | | | AAAAGGTATTAGAAAAACCA′] |
| 1207 | m.7511T > C | 4574 | MT-TS1 | [′GCCAACCCCATGGCCTCCATGACTTYTTCAA |
| | | | | AAAGGTATTAGAAAAACCAT′] |
| 1208 | m.616T > C | 4558 | MT-TF | [′CCTCCTCAAAGCAATACACTGAAAABGTTTA |
| | | | | GACGGGCTCACATCACCCCA′] |
| 1209 | m.4409T > C | 4569 | MT-TM | [′TATCACACCCCATCCTAAAGTAAGGYCAGCT |
| | | | | AAATAAGCTATCGGGCCCAT′] |
| 1210 | m.8356T > C | 4566 | MT-TK | [′AAAGATTAAGAGAACCAACACCTCTYTACA |
| | | | | GTGAAATGCCCCAACTAAATA′] |
| 1211 | m.12297T > C | 4568 | MT-TL2 | [′AAAGGATAACAGCTATCCATTGGTCYTAGG |
| | | | | CCCCAAAAATTTTGGTGCAAC′] |
| 1212 | m.3271T > C | 4567 | MT-TL1 | [′CCGGTAATCGCATAAAACTTAAAACYTTAC |
| | | | | AGTCAGAGGTTCAATTCCTCT′] |
| 1213 | m.3250T > C | 4567 | MT-TL1 | [′GGTTTGTTAAGATGGCAGAGCCCGGYAATC |
| | | | | GCATAAAACTTAAAACTTTAC′] |
| 1214 | m.3290T > C | 4567 | MT-TL1 | [′TAAAACTTTACAGTCAGAGGTTCAAYTCCTC |
| | | | | TTCTTAACAACATACCCATG′] |
| 1215 | m.4290T > C | 4565 | MT-TI | [′AAATATGTCTGATAAAAGAGTTACTYTGATA |
| | | | | GAGTAAATAATAGGAGCTTA′] |
| 1216 | m.4291T > C | 4565 | MT-TI | [′AATATGTCTGATAAAAGAGTTACTTYGATAG |
| | | | | AGTAAATAATAGGAGCTTAA′] |
| 1217 | m.9997T > C | 4563 | MT-TG | [′ATCTATTGATGAGGGTCTTACTCTTYTAGTA |
| | | | | TAAATAGTACCGTTAACTTC′] |
| 1218 | m.10010T > C | 4563 | MT-TG | [′GGTCTTACTCTTTTAGTATAAATAGYACCGT |
| | | | | TAACTTCCAATTAACTAGTT′] |
| 1219 | m.4336T > C | 4572 | MT-TQ | [′GCTTAAACCCCCTTATTTCTAGGACYATGAG |
| | | | | AATCGAACCCATCCCTGAGA′] |
| 1220 | m.14709T > C | 4556 | MT-TE | [′CGGACTACAACCACGACCAATGATAYGAAA |
| | | | | AACCATCGTTGTATTTCAACT′] |
| 1221 | m.14674T > C | 4556 | MT-TE | [′TCAACAGAAACAAAGCATACATCATBATTCT |
| | | | | CGCACGGACTACAACCACGA′] |
| 1222 | m.5692T > C | 4570 | MT-TN | [′GGGACTTAAACCCACAAACACTTAGYTAAC |
| | | | | AGCTAAGCACCCTAATCAACT′] |
| 1223 | m.5728T > C | 4570 | MT-TN | [′GCACCCTAATCAACTGGCTTCAATCYACTTC |
| | | | | TCCCGCCGCCGGGAAAAAAG′] |
| 1224 | m.2991T > C | 4550 | MT-RNR2 | [′TCAACAATAGGGTTTACGACCTCGAYGTTGG |
| | | | | ATCAGGACATCCCGATGGTG′] |
| 1225 | m.1291T > C | 4549 | MT-RNR1 | [′ATCTTCAGCAAACCCTGATGAAGGCYACAA |
| | | | | AGTAAGCGCAAGTACCCACGT′] |
| 1226 | m.1095T > C | 4549 | MT-RNR1 | [′CTGGGATTAGATACCCCACTATGCTYAGCCC |
| | | | | TAAACCTCAACAGTTAAATC′] |
| 1227 | m.8528T > C | −1 | — | [′TTATAACAAACCCTGAGAACCAAAAYGAAC |
| | | | | GAAAATCTGTTCGCTTCATTC′] |
| 1228 | m.8993T > C | 4508 | MT-ATP6 | [′AGCCTACTCATTCAACCAATAGCCCBGGCCG |
| | | | | TACGCCTAACCGCTAACATT′] |
| 1229 | m.9101T > C | 4508 | MT-ATP6 | [′ATTAACCTTCCCTCTACACTTATCAYCTTCA |
| | | | | CAATTCTAATTCTACTGACT′] |
| 1230 | m.9176T > C | 4508 | MT-ATP6 | [′ATCCAAGCCTACGTTTTCACACTTCBAGTAA |
| | | | | GCCTCTACCTGCACGACAAC′] |
| 1231 | m.8851T > C | 4508 | MT-ATP6 | [′AAACCTAGCCATGGCCATCCCCTTAYGAGC |
| | | | | GGGCACAGTGATTATAGGCTT′] |
| 1232 | m.9185T > C | 4508 | MT-ATP6 | [′TACGTTTTCACACTTCTAGTAAGCCYCTACC |
| | | | | TGCACGACAACACATAATGA′] |
| 1233 | m.7587T > C | 4513 | MT-CO2 | [′ATAGGCTAAATCCTATATATCTTAAYGGCAC |
| | | | | ATGCAGCGCAAGTAGGTCTA′] |
| 1234 | m.6742T > C | 4512 | MT-CO1 | [′GGTATGGTCTGAGCTATGATATCAAYTGGCT |
| | | | | TCCTAGGGTTTATCGTGTGA′] |
| 1235 | m.6721T > C | 4512 | MT-CO1 | [′AAAGAACCATTTGGATACATAGGTAYGGTC |
| | | | | TGAGCTATGATATCAATTGGC′] |
| 1236 | m.7275T > C | 4512 | MT-CO1 | [′CATGAAACATCCTATCATCTGTAGGYTCATT |
| | | | | CATTTCTCTAACAGCAGTAA′] |
| 1237 | m.15572T > C | 4519 | MT-CYB | [′CATCAAGCCCGAATGATATTTCCTAYTCGCC |
| | | | | TACACAATTCTCCGATCCGT′] |
| 1238 | m.15197T > C | 4519 | MT-CYB | [′GGCCACAGTAATTACAAACTTACTAYCCGCC |
| | | | | ATCCCATACATTGGGACAGA′] |
| 1239 | m. 14849T > C | 4519 | MT-CYB | [′CATCTCCGCATGATGAAACTTCGGCYCACTC |
| | | | | CTTGGCGCCTGCCTGATCCT′] |
| 1240 | NC_012920.1: m.14484T > C | 4541 | MT-ND6 | [′GCTGTAGTATATCCAAAGACAACCAYCATTC |
| | | | | CCCCTAAATAAATTAAAAAA′] |
| 1241 | m. 14487T > C | 4541 | MT-ND6 | [′GTAGTATATCCAAAGACAACCATCAYTCCCC |
| | | | | CTAAATAAATTAAAAAAACT′] |
| 1242 | m.12706T > C | 4540 | MT-ND5 | [′ATCAGTTCTTCAAATATCTACTCATYTTCCT |
| | | | | AATTACCATACTAATCTTAG′] |
| 1243 | m.10563T > C | 4539 | MT-ND4L | [′CTCACACCTCATATCCTCCCTACTAYGCCTA |
| | | | | GAAGGAATAATACTATCGCT′] |
| 1244 | m.10663T > C | 4539 | MT-ND4L | [′ATATTGTGCCTATTGCCATACTAGTYTTTGC |
| | | | | CGCCTGCGAAGCAGCGGTNG′] |
| 1245 | m.10191T > C | 4537 | MT-ND3 | [′TTACGAGTGCGGCTTCGACCCTATAYCCCCC |
| | | | | GCCCGCGTCCCTTTCTCCAT′] |
| 1246 | m.10158T > C | 4537 | MT-ND3 | [′ACAACTCAACGGCTACATAGAAAAAYCCAC |
| | | | | CCCTTACGAGTGCGGCTTCGA′] |
| 1247 | m.4681T > C | 4536 | MT-ND2 | [′CAAGCAACCGCATCCATAATCCTTCYAATAG |
| | | | | CTATCCTCTTCAACAATATA′] |
| 1248 | m.4160T > C | 4535 | MT-ND1 | [′TACCCCCGATTCCGCTACGACCAACYCATAC |
| | | | | ACCTCCTATGAAAAAACTTC′] |
| 1249 | m.3394T > C | 4535 | MT-ND1 | [′GCTTACCGAACGAAAAATTCTAGGCYATAT |
| | | | | ACAACTACGCAAAGGCCCCAA′] |
| 1250 | m.3308T > C | 4535 | MT-ND1 | [′GGTTCAATTCCTCTTCTTAACAACABACCCA |
| | | | | TGGCCAACCTCCTACTCCTC′] |
| 1251 | m.3949T > C | 4535 | MT-ND1 | [′ACTAGTCTCAGGCTTCAACATCGAAYACGCC |
| | | | | GCAGGCCCCTTCGCCCTATT′] |
| 1252 | NM_003140.2(SRY): c.326T > C | 6736 | SRY | [′CTTACTGAAGCCGAAAAATGGCCATYCTTCC |
| | (p.Phe109Ser) | | | AGGAGGCACAGAAATTACAG′] |
| 1253 | NM_003140.2(SRY): c.203T > C | 6736 | SRY | [′GTGAAGCGACCCATGAACGCATTCAYCGTG |
| | (p.Ile68Thr) | | | TGGTCTCGCGATCAGAGGCGC′] |
| 1254 | NM_021083.2(XK): c.880T > C | 7504 | XK | [′ACTCTATACTGGTATCAACATGTTCNGCTGG |
| | (p.Cys294Arg) | | | TCTGCTGTACAGCTGAAAAT′] |
| 1255 | NM_000354.5(SERPINA7): | 6906 | SERPINA7 | [′CACCAGATGGAACAATACTATCACCYAGTG |
| | c.740T > C (p.Leu247Pro) | | | GATATGGAATTGAACTGCACA′] |
| 1256 | NM_000044.3(AR): c.2033T > C | 367 | AR | [′TGTCAGCCCATCTTTCTGAATGTCCYGGAAG |
| | (p.Leu678Pro) | | | CCATTGAGCCAGGTGTAGTG′] |
| 1257 | NM_000044.3(AR): c.2423T > C | 367 | AR | [′ATCACCCCCCAGGAATTCCTGTGCAYGAAA |
| | (p.Met808Thr) | | | GCACTGCTACTCTTCAGCATT′] |
| 1258 | NM_000044.3(AR): c.2596T > C | 367 | AR | [′CTACCAGCTCACCAAGCTCCTGGACYCCGTG |
| | (p.Ser866Pro) | | | CAGCCTGTAAGCAAACGATG′] |
| 1259 | NM_000451.3(SHOX): c.877T > C | 6473 | SHOX | [′GAAGCACGCGGAGGCCCTGGGGCTCYGACC |
| | (p.Ter293Arg) | | | CGCCGCGCAGCCCCCCGCGCG′] |
| 1260 | NM_000330.3(RS1): c.286T > C | −1 | — | [′TTGAGCCGGGCCTTGTTTGCAGTCCRCGAAG |
| | (p.Trp96Arg) | | | AATACCAGCCCACATACTGC′] |
| 1261 | NM_000330.3(RS1): c.38T > C | 6247 | RS1 | [′ATAGAAGGCTTTTTGTTATTACTTCYCTTTG |
| | (p.Leu13Pro) | | | GCTATGAAGGTATGTGCTAT′] |
| 1262 | NM_000330.3(RS1): c.667T > C | −1 | — | [′CCGAGCTGAGGCAGGCATCAGGCACRCTTG |
| | (p.Cys223Arg) | | | CTGACGCACTCCAGCAGCTCC′] |
| 1263 | NM_002764.3(PRPS1): c.344T > | 5631 | PRPS1 | [′ATCTCAGCCAAGCTTGTTGCAAATAYGCTAT |
| | C (p.Met115Thr) | | | CTGTAGCAGGTGCAGATCAT′] |
| 1264 | NM_002764.3(PRPS1): c.455T > | 5631 | PRPS1 | [′AATTTGTATGCAGAGCCGGCTGTCCYAAAGT |
| | C (p.Leu152Pro) | | | GGATAAGGGAGAATATCTCT′] |
| 1265 | NM_002764.3(PRPS1): c.869T > | 5631 | PRPS1 | [′TTTCCTTTCTTGCCTTTCTAGGTGAYTGACAT |
| | C (p.Ile290Thr) | | | CTCTATGATCCTTGCAGAA′] |
| 1266 | NM_000291.3(PGK1): c.263T > C | 5230 | PGK1 | [′CCAGTTGCTGTAGAACTCAAATCTCYGCTGG |
| | (p.Leu88Pro) | | | GCAAGTAAGTGCCAGGCTCT′] |
| 1267 | NM_000291.3(PGK1): c.946T > C | 5230 | PGK1 | [′CACCTCTACCCCTCAGGGCTTGGACYGTGGT |
| | (p.Cys316Arg) | | | CCTGAAAGCAGCAAGAAGTA′] |
| 1268 | NM_000291.3(PGK1): c.758T > C | 5230 | PGK1 | [′CATCATTTTGGCTCCCCTGTGTAGAYTGGCA |
| | (p.Ile253Thr) | | | CTTCTCTGTTTGATGAAGAG′] |
| 1269 | NM_001122606.1(LAMP2): | 3920 | LAMP2 | [′CATTGCAAATAACAATCTCAGCTACYGGGA |
| | c.961T > C (p.Trp321Arg) | | | TGCCCCCCTGGGAAGTTCTTA′] |
| 1270 | NM_000206.2(IL2RG): c.343T > | 3561 | IL2RG | [′ATTCTCTGAAGAAATCACTTCTGGCYGTCAG |
| | C (p.Cys115Arg) | | | TTGCAAAAAAAGGAGATCCA′] |
| 1271 | NM_000206.2(IL2RG): c.452T > | 3561 | IL2RG | [′ACACAGATGCTAAAACTGCAGAATCYGGGT |
| | C (p.Leu151Pro) | | | AATTTGGAAAGAAAGGGTCAA′] |
| 1272 | NM_000194.2(HPRT1): c.122T > | 3251 | HPRT1 | [′GAAAGGGTGTTTATTCCTCATGGACYAATTA |
| | C (p.Leu41Pro) | | | TGGACAGGTAAGTAAGATCT′] |
| 1273 | NM_000194.2(HPRT1): c.170T > | 3251 | HPRT1 | [′CTTGCTCGAGATGTGATGAAGGAGAYGGGA |
| | C (p.Met57Thr) | | | GGCCATCACATTGTAGCCCTC′] |
| 1274 | NM_000132.3(F8): c.6554T > C | 2157 | F8 | [′ATTCGCAGCACTCTTCGCATGGAGTYGATGG |
| | (p.Leu2185Ser) | | | GCTGTGATTTAAATAGTAAG′] |
| 1275 | NM_000132.3(F8): c.985T > C | 2157 | F8 | [′GGACCTTGGACAGTTTCTACTGTTTYGTCAT |
| | (p.Cys329Arg) | | | ATCTCTTCCCACCAACATGG′] |
| 1276 | NM_000132.3(F8): c.5372T > C | 2157 | F8 | [′AGAGCAGAAGTTGAAGATAATATCAYGGTG |
| | (p.Met1791Thr) | | | AGTTAAGGACAGTGGAATTAC′] |
| 1277 | NM_000132.3(F8): c.1754T > C | 2157 | F8 | [′CCTTTCAATATATGTAATTAACAGAYAATGT |
| | (p.Ile585Thr) | | | CAGACAAGAGGAATGTCATC′] |
| 1278 | NM_000132.3(F8): c.935T > C | 2157 | F8 | [′TCCTTGGAAATCTCGCCAATAACTTYCCTTA |
| | (p.Phe312Ser) | | | CTGCTCAAACACTCTTGATG′] |
| 1279 | NM_000132.3(F8): c.980T > C | 2157 | F8 | [′TTGATGGACCTTGGACAGTTTCTACYGTTTT |
| | (p.Leu327Pro) | | | GTCATATCTCTTCCCACCAA′] |
| 1280 | NM_000132.3(F8): c.1174T > C | 2157 | F8 | [′CTCTCCTTCCTTTATCCAAATTCGCYCAGTTG |
| | (p.Ser392Pro) | | | CCAAGAAGCATCCTAAAAC′] |
| 1281 | NM_000132.3(F8): c.1417T > C | 2157 | F8 | [′ATCAGGAATCTTGGGACCTTTACTTYATGGG |
| | (p.Tyr473His) | | | GAAGTTGGAGACACACTGTT′] |
| 1282 | NM_000132.3(F8): c.1481T > C | 2157 | F8 | [′AATCAAGCAAGCAGACCATATAACAYCTAC |
| | (p.Ile494Thr) | | | CCTCACGGAATCACTGATGTC′] |
| 1283 | NM_000132.3(F8): c.1729T > C | 2157 | F8 | [′CCCTCTCCTCATCTGCTACAAAGAAYCTGTA |
| | (p.Ser577Pro) | | | GATCAAAGAGGAAACCAGGT′] |
| 1284 | NM_000132.3(F8): c.1958T > C | 2157 | F8 | [′CAGTTGTCAGTTTGTTTGCATGAGGYGGCAT |
| | (p.Val653Ala) | | | ACTGGTACATTCTAAGCATT′] |
| 1285 | NM_000132.3(F8): c.2029T > C | 2157 | F8 | [′TTCTGTCTTCTTCTCTGGATATACCYTCAAAC |
| | | | | ACAAAATGGTCTATGAAGA′] |
| 1286 | NM_000132.3(F8): c.6193T > C | 2157 | F8 | [′GTTTCTTTACTTGGGCAAAGGACAGYGGGCC |
| | | | | CCAAAGCTGGCCAGACTTCA′] |
| 1287 | NM_007325.4(GRIA3): c.2117T > | 2892 | GRIA3 | [′GTGTACGAGAAAATGTGGTCTTACAYGAAA |
| | C (p.Met706Thr) | | | TCAGCGGAGCCATCTGTGTTT′] |
| 1288 | NM_000402.4(G6PD): c.1058T > | 2539 | G6PD | [′GAGGGCGAGGCCACCAAAGGGTACCYGGAC |
| | C (p.Leu353Pro) | | | GACCCCACGGTGCCCCGCGGG′] |
| 1289 | NM_000402.4(G6PD): c. 1054T > | 2539 | G6PD | [′TGGAGAGGGCGAGGCCACCAAAGGGYACCT |
| | C (p.Tyr352His) | | | GGACGACCCCACGGTGCCCCG′] |
| 1290 | NM_001097642.2(GJB1): | 2705 | GJB1 | [′GGTCCACATCTCAGGGACACTGTGGYGGAC |
| | c.397T > C (p.Trp133Arg) | | | CTATGTCATCAGCGTGGTGTT′] |
| 1291 | NM_000166.5(GJB1): c.407T > C | 2705 | GJB1 | [′TCAGGGACACTGTGGTGGACCTATGYCATC |
| | (p. Val136Ala) | | | AGCGTGGTGTTCCGGCTGTTG′] |
| 1292 | NM_000032.4(ALAS2): c.595T > | 212 | ALAS2 | [′TGTGTCCGTCTGGTGTAGTAATGATYACCTG |
| | C (p.Tyr199His) | | | GGCATGAGCCGACACCCTCA′] |
| 1293 | NM_020061.5(OPNILW): | 5956 | OPNILW | [′CTGGCCCCACGGCCTGAAGACTTCAYGCGG |
| | c.607T > C (p.Cys203Arg) | | | CCCAGACGTGTTCAGCGGCAG′] |
| 1294 | NM_000513.2(OPN1MW): | 2652 | OPN1MW | [′CTGGCCCCACGGCCTGAAGACTTCAYGCGG |
| | c.607T > C (p.Cys203Arg) | | | CCCAGACGTGTTCAGCGGCAG′] |
| 1295 | NM_000513.2(OPN1MW): | 2652 | OPN1MW | [′GGCCATCGTGGGCATTGCCTTCTCCYGGATC |
| | c.529T > C (p.Trp177Arg) | | | TGGGCTGCTGTGTGGACAGC′] |
| 1296 | NM_000273.2(GPR143): c.397T > | 4935 | GPR143 | [′GCTGTTGTACAGTGCCTGCTTCTGGHGGCTG |
| | C (p.Trp133Arg) | | | TTTTGCTATGCAGTGGATGC′] |
| 1297 | NM_000133.3(F9): c.52T > C | 2158 | F9 | [′AGAATCACCAGGCCTCATCACCATCYGCCTT |
| | (p.Cys18Arg) | | | TTAGGATATCTACTCAGTGC′] |
| 1298 | NM_000133.3(F9): c.1058T > C | 2158 | F9 | [′TTCCTCAAATTTGGATCTGGCTATGYAAGTG |
| | (p.Val353Ala) | | | GCTGGGGAAGAGTCTTCCAC′] |
| 1299 | NM_000133.3(F9): c.1144T > C | 2158 | F9 | [′AGTTCCACTTGTTGACCGAGCCACAHGTCTT |
| | (p.Cys382Arg) | | | CGATCTACAAAGTTCACCAT′] |
| 1300 | NM_000133.3(F9): c.1328T > C | 2158 | F9 | [′TGTGCAATGAAAGGCAAATATGGAAYATAT |
| | (p.Ile443Thr) | | | ACCAAGGTATCCCGGTATGTC′] |
| 1301 | NM_000133.3(F9): c.1357T > C | 2158 | F9 | [′TACCAAGGTATCCCGGTATGTCAACYGGATT |
| | (p.Trp453Arg) | | | AAGGAAAAAACAAAGCTCAC′] |
| 1302 | NM_000133.3(F9): c.82T > C | 2158 | F9 | [′TTTAGGATATCTACTCAGTGCTGAAYGTACA |
| | (p.Cys28Arg) | | | GGTTTGTTTCCTTTTTTAAA′] |
| 1303 | NM_000133.3(F9): | 2158 | F9 | [′CTGAATTTTGGAAGCAGTATGTTGGYAAGC |
| | c.277 + 2T > C | | | AATTCATTTTATCCTCTAGCT′] |
| 1304 | NM_000133.3(F9): c.1031T > C | 2158 | F9 | [′ATTGCTGACAAGGAATACACGAACAYCTTC |
| | (p.Ile344Thr) | | | CTCAAATTTGGATCTGGCTAT′] |
| 1305 | NM_000169.2(GLA): c.484T > C | −1 | — | [′CATTGATGCCCAGACCTTTGCTGACYGGGGA |
| | (p.Trp162Arg) | | | GTAGATCTGCTAAAATTTGA′] |
| 1306 | NM_000169.2(GLA): c.806T > C | −1 | — | [′TTATTTCATTCTTTTTCTCAGTTAGYGATTGG |
| | (p.Val269Ala) | | | CAACTTTGGCCTCAGCTGG′] |
| 1307 | NM_015107.2(PHF8): c.836T > C | 23133 | PHF8 | [′CCAACAAATGCCAATCTGACTCTCTYTGAGT |
| | (p.Phe279Ser) | | | GCTGGAGCAGTTCCTCTAAT′] |
| 1308 | NM_033290.3(MID1): c.1877T > | 4281 | MID1 | [′TATGATGCTTTGAACTCCATCCACCYCTACA |
| | C (p.Leu626Pro) | | | CCTTCGACGTCGCATTTGCG′] |
| 1309 | NM_033290.3(MID1): c.884T > C | 4281 | MID1 | [′TTCAAGGTGATGAGGCTTCGCAAACYGGCT |
| | (p.Leu295Pro) | | | CAGCAGATTGCAAACTGCAAA′] |
| 1310 | NM_000444.5(PHEX): c.755T > C | 5251 | PHEX | [′CAGTATCGGGATGCCCTTTACAAGTYCATGG |
| | (p.Phe252Ser) | | | TGGATACTGCCGTGCTTTTA′] |
| 1311 | NM_000444.5(PHEX): c. 1664T > | 5251 | PHEX | [′CTCATAGGATTTCCAGCAGGAGAGCYCCAG |
| | C (p.Leu555Pro) | | | AAGCCTTTCTTTTGGGGAACA′] |
| 1312 | NM_001205019.1(GK): c.1525T > | 2710 | GK | [′AGAAAGTGAAATTCGTTATTCTACAYGGAA |
| | C (p.Trp509Arg) | | | GAAAGCTGTGATGAAGTCAAT′] |
| 1313 | NM_000475.4(NROB1): c.890T > | 190 | NROB1 | [′AACTGCTGGGCGTCCCTGCTCATGCYTGAGC |
| | C (p.Leu297Pro) | | | TGGCCCAGGACCGCTTGCAG′] |
| 1314 | NM_000531.5(OTC): c.332T > C | 5009 | OTC | [′CTTCTGGGAGGACATCCTTGTTTTCYTACCA |
| | (p.Leul11Pro) | | | CACAAGATATTCATTTGGGT′] |
| 1315 | NM_000531.5(OTC): c.134T > C | 5009 | OTC | [′CTGAAGGGCCGTGACCTTCTCACTCYAAAA |
| | (p.Leu45Pro) | | | AACTTTACCGGAGAAGAAATT′] |
| 1316 | NM_000531.5(OTC): | 5009 | OTC | [′TTGGCAGAGCAGTATGCCAAAGAGGYATGC |
| | c.717 + 2T > C | | | TCTTTACATGTAAAGCTATTA′] |
| 1317 | NM_001399.4(EDA): c.181T > C | 1896 | EDA | [′CCTCCACCTGCTGACGTTGTGCTGCYACCTA |
| | (p.Tyr61His) | | | GAGTTGCGCTCGGAGTTGCG′] |
| 1318 | NM_001015877.1(PHF6): c.2T > | 84295 | PHF6 | [′CATTCTAAAGGCAATTTAAAAATCAYGTCA |
| | C (p.Met1Thr) | | | AGCTCAGTTGAACAGAAAAAA′] |
| 1319 | NM_001128834.2(PLP1): | 5354 | PLP1 | [′CATCACCTATGCCCTGACCGTTGTGYGGCTC |
| | c.487T > C (p.Trp163Arg) | | | CTGGTGTTTGCCTGCTCTGC′] |
| 1320 | NM_001128834.2(PLP1): | 5354 | PLP1 | [′CCTGGCAAGGTTTGTGGCTCCAACCYTCTGT |
| | c.671T > C (p.Leu224Pro) | | | CCATCTGCAAAACAGCTGAG′] |
| 1321 | NM_001128834.2(PLP1): | 5354 | PLP1 | [′AACACCTGGACCACCTGCCAGTCTAYTGCCT |
| | c.560T > C (p.Ile187Thr) | | | TCCCCAGCAAGACCTCTGCC′] |
| 1322 | NM_001128834.2(PLP1): | 5354 | PLP1 | [′ATTTTCCTGCAGTTCCAAATGACCTYCCACC |
| | c.710T > C (p.Phe237Ser) | | | TGTTTATTGCTGCATTTGTG′] |
| 1323 | NM_000116.4(TAZ): c.352T > C | 6901 | TAZ | [′CTCCCACTTCTTCAGCTTGGGCAAGYGTGTG |
| | (p.Cys118Arg) | | | CCTGTGTGCCGAGGTGAGCT′] |
| 1324 | NM_000377.2(WAS): c.244T > C | 7454 | WAS | [′CTTCGTGAAGGATAACCCCCAGAAGYCCTA |
| | (p.Ser82Pro) | | | CTTCATCCGCCTTTACGGCCT′] |
| 1325 | NM_000377.2(WAS): c.809T > C | 7454 | WAS | [′AACCTCGACCCAGATCTGCGGAGTCYGTTCT |
| | (p.Leu270Pro) | | | CCAGGGCAGGAATCAGCGAG′] |
| 1326 | NM_182680.1(AMELX): c.2T > C | −1 | — | [′CTTACATTTCAGAACCATCAAGAAAYGGGG |
| | (p.Met1Thr) | | | ACCTGGATTTTATTTGCCTGC′] |
| 1327 | NM_000074.2(CD40LG): | 959 | CD40LG | [′ACCATGAGCAACAACTTGGTAACCCYGGAA |
| | c.464T > C (p.Leu155Pro) | | | AATGGGAAACAGCTGACCGTT′] |
| 1328 | NM_139058.2(ARX): c.98T > C | 170302 | ARX | [′TCCTCCTACTGCATCGACAGCATCCYGGGCC |
| | (p.Leu33Pro) | | | GGAGGAGCCCGTGCAAAATG′] |
| 1329 | NM_001109878.1(TBX22): | 50945 | TBX22 | [′TGATCATTTCTCCTCCAGATCATTCYGCAAT |
| | c.641T > C (p.Leu214Pro) | | | CCATGCATAAGTACAAACCC′] |
| 1330 | NM_000061.2(BTK): c.2T > C | 695 | BTK | [′GGTGAACTCCAGAAAGAAGAAGCTAYGGCC |
| | (p.Met1Thr) | | | GCAGTGATTCTGGAGAGCATC′] |
| 1331 | NM_000061.2(BTK): c.1223T > C | 695 | BTK | [′AAGGACCTGACCTTCTTGAAGGAGCYGGGG |
| | (p.Leu408Pro) | | | ACTGGACAATTTGGGGTAGTG′] |
| 1332 | NM_000061.2(BTK): c.1516T > C | 695 | BTK | [′GCTGCTAGAGATGTGCAAGGATGTCYGTGA |
| | (p.Cys506Arg) | | | AGCCATGGAATACCTGGAGTC′] |
| 1333 | NM_000061.2(BTK): c.1625T > C | 695 | BTK | [′GTTGTTAAAGTATCTGATTTCGGCCYGTCCA |
| | (p.Leu542Pro) | | | GGTGAGTGTGGCTTTTTCAT′] |
| 1334 | NM_000061.2(BTK): c.1741T > C | 695 | BTK | [′CAAGTTCAGCAGCAAATCTGACATTYGGGC |
| | (p.Trp581Arg) | | | TTTTGGTAAGTGGATAAGATT′] |
| 1335 | NM_000061.2(BTK): c.1955T > C | 695 | BTK | [′TTCAAAATTCTTCTGAGCAATATTCYAGATG |
| | (p.Leu652Pro) | | | TCATGGATGAAGAATCCTGA′] |
| 1336 | NM_015884.3(MBTPS2): | 51360 | MBTPS2 | [′GATGGACAATGGATTCTAAACTCTTYCTTGG |
| | c.1424T > C (p.Phe475Ser) | | | ATGCCACCCTTACCTCAGTG′] |
| 1337 | NM_014009.3(FOXP3): c.970T > | 50943 | FOXP3 | [′GATTCATCCCCACCCTCTGACAGAGYTCCTC |
| | C (p.Phe324Leu) | | | CACAACATGGACTACTTCAA′] |
| 1338 | NM_014009.3(FOXP3): | 50943 | FOXP3 | [′GACACTCAATGAGATCTACCACTGGYTCAC |
| | c.1099T > C (p.Phe367Leu) | | | ACGCATGTTTGCCTTCTTCAG′] |
| 1339 | NM_022567.2(NYX): c.302T > C | 60506 | NYX | [′CTGCGCCACAACAACCTGTCCTTCAYCACGC |
| | (p.Ile101Thr) | | | CCGGCGCCTTCAAGGGCCTG′] |
| 1340 | NM_003639.4(IKBKG): | 8517 | IKBKG | [′CACCCTGCAGATACATGTCATGGAGYGCATT |
| | c.1249T > C (p.Cys417Arg) | | | GAGTAGGGCCGGCCAGTGCA′] |
| 1341 | NM_006579.2(EBP): c.53T > C | 10682 | EBP | [′CCATACTGGCCTCAGCACCTAAGACYGGAC |
| | (p.Leu18Pro) | | | AACTTTGTACCTAATGACCGC′] |
| 1342 | NM_003159.2(CDKL5): c.215T > | 6792 | CDKL5 | [′CTTCGGACTCTCAAGCAGGAAAACAHTGTG |
| | C (p.Ile72Thr) | | | GAGTTGAAGGAAGCATTTCGT′] |
| 1343 | NM_001011658.3(TRAPPC2): | −1 | — | [′GCCTTAATTATTTCACATATGAGGTYTATTA |
| | c.248T > C (p.Phe83Ser) | | | TGCTTCATGACATAAGACAA′] |
| 1344 | NM_001011658.3(TRAPPC2): | −1 | — | [′AGTTACCTTTACTAAGAAGGTAAGGRTATGC |
| | 238 + 4T > C | | | CCCGCAGTGACAAATGCCGA′] |
| 1345 | NM_003688.3(CASK): c.802T > C | 8573 | CASK | [′GGATCCAGCTGAAAGGATCACTGTTYATGA |
| | (p.Tyr268His) | | | AGCACTGAATCACCCATGGCT′] |
| 1346 | NM_003688.3(CASK): c.2740T > | 8573 | CASK | [′TGAGCTCGTGTGCACAGCCCCACAGYGGGT |
| | C (p.Trp914Arg) | | | CCCTGTCTCCTGGGTCTATTA′] |
| 1347 | NM_001159702.2(FHL1): | 2273 | FHL1 | [′AGGGGAGGACTTCTACTGCGTGACTYGCCA |
| | c.457T > C (p.Cys153Arg) | | | TGAGACCAAGTTTGCCAAGCA′] |
| 1348 | NM_001159702.2(FHL1): | 2273 | FHL1 | [′GGAGGACTCCCCCAAGTGCAAGGGGYGCTT |
| | c.310T > C (p.Cys104Arg) | | | CAAGGCCATTGTGGCAGGTAC′] |
| 1349 | NM_001159702.2(FHL1): | 2273 | FHL1 | [′CACCGCTGTGGAGGACCAGTATTACYGCGT |
| | c.625T > C (p.Cys209Arg) | | | GGATTGCTACAAGAACTTTGT′] |
| 1350 | NM_001363.4(DKC1): c.113T > C | 1736 | DKC1 | [′ATACAACACGCTGAAGAATTTCTTANCAAA |
| | (p.Ile38Thr) | | | CCTGAATCCAAAGTTGCTAAG′] |
| 1351 | NM_178152.2(DCX): c.373T > C | 1641 | DCX | [′CTTATTTCTTGCCTTAGGGGAAAGCYATGTC |
| | (p.Tyr125His) | | | TGTTCCTCAGACAACTTCTT′] |
| 1352 | NM_005183.3(CACNA1F): | 778 | CACNAIF | [′ATCCTGTTGAACGTGTTTCTTGCCAYTGCTG |
| | c.2267T > C (p.Ile756Thr) | | | TGGACAACCTGGCCAGTGGA′] |
| 1353 | NM_001493.2(GDI1): c.275T > C | 2664 | GDI1 | [′ACAGGGCAGCTGGTAAAGATGCTACYGTAT |
| | (p.Leu92Pro) | | | ACAGAGGTGACTCGCTACCTG′] |
| 1354 | NM_006517.4(SLC16A2): | 6567 | SLC16A2 | [′ATCATGGCCCCCATTGCATTTGAGCYGGTGG |
| | c.1313T > C (p.Leu438Pro) | | | GCCCAATGCAGGCCTCACAG′] |
| 1355 | NM_006517.4(SLC16A2): | 6567 | SLC16A2 | [′CTCCAGGTCCTTTCCTTCCTGCTCCYGGGCC |
| | c.1190T > C (p.Leu397Pro) | | | TGATGTCCATGATGATTCCC′] |
| 1356 | NM_006517.4(SLC16A2): | 6567 | SLC16A2 | [′CCCCCCATCATCGGGGCTGTAATCCYCTTCT |
| | c.1481T > C (p.Leu494Pro) | | | TCGTCCCTCTGATGCATCAA′] |
| 1357 | NM_004586.2(RPS6KA3): | 6197 | RPS6KA3 | [′GAAATGCTTACTGGTACACTCCCTTYCCAAG |
| | c.803T > C (p.Phe268Ser) | | | GAAAAGATCGAAAAGAAACA′] |
| 1358 | NM_000489.4(ATRX): c.4840T > | 546 | ATRX | [′AAGTTTTCTTCATACAGTTCTTTTGYGTGAC |
| | C (p.Cys1614Arg) | | | AAACTGGATTTCAGCACGGC′] |
| 1359 | NM_000489.4(ATRX): c.6250T > | 546 | ATRX | [′GAAGTGGCTTCGAAACATTGACTATYACCGT |
| | C (p.Tyr2084His) | | | TTAGATGGTTCCACTACTGC′] |
| 1360 | NM_000489.4(ATRX): c.1226T > | 546 | ATRX | [′GATATTAAGAAGGCTCATCTTGCATYGGAA |
| | C (p.Leu409Ser) | | | GAAGACTTAAATTCCGAGTTT′] |
| 1361 | NM_000489.4(ATRX): c.6149T > | 546 | ATRX | [′CAGTCCCTCATATCTCTGGACTTGAYTGAAG |
| | C (p.Ile2050Thr) | | | ATTTTCTTGAATTAGCTAGT′] |
| | NM_001110556.1(FLNA): | 2316 | FLNA | |
| | c.720 + 2T > C | | | |
| 1362 | NM_001127899.3(CLCN5): | 1184 | CLCN5 | [′AGGTGGGGTGACTCGGATGACTGTTYCTCTT |
| | 6c.178T > C (p.Ser590Pro) | | | GTTGTCATAATGTTTGAACT′] |
| 1363 | NM_004992.3(MECP2): c.464T > | 4204 | MECP2 | [′GACACATCCCTGGACCCTAATGATTBTGACT |
| | C (p.Phe155Ser) | | | TCACGGTAACTGGGAGAGGG′] |
| 1364 | NM_001061.4(TBXAS1): | 6916 | TBXAS1 | [′TGCCTCGGGGTGCGTCTAGGGCTGCYTGAG |
| | c.1463T > C (p.Leu488Pro) | | | GTCAAGTTGACACTGCTCCAC′] |
| 1365 | NM_001061.4(TBXAS1): | 6916 | TBXAS1 | [′TTTTTTATTCCTCCCAGGTACTATCYTGGTCG |
| | c.248T > C (p.Leu83Pro) | | | TCGGATGTTTATTGTTATT′] |
| 1366 | NM_000128.3(F11): c.901T > C | 2160 | F11 | [′TTCTTCATTTTACCATGACACTGATYTCTTGG |
| | (p.Phe301Leu) | | | GAGAAGAACTGGATATTGT′] |
| 1367 | NM_000128.3(F11): c.166T > C | 2160 | F11 | [′GGTAGTCTGCACTTACCACCCAAGAYGTTTA |
| | (p.Cys56Arg) | | | CTCTTCACTTTCACGGCGGA′] |
| 1368 | NM_000203.4(IDUA): c.1469T > | 3425 | IDUA | [′AGCCCCGACGGCGAGTGGCGGCGCCYGGGC |
| | C (p.Leu490Pro) | | | CGGCCCGTCTTCCCCACGGCA′] |
| 1369 | NM_000431.3(MVK): c.803T > C | 4598 | MVK | [′ATCGTGGCCCCCCTCCTGACCTCAAYAGATG |
| | (p.Ile268Thr) | | | CCATCTCCCTGGAGTGTGAG′] |
| 1370 | NM_014425.3(INVS): c.1478T > | 27130 | INVS | [′TTATGCTTATAGGGAAGAACAGCTTYGCATT |
| | C (p.Leu493Ser) | | | GGTCCTGCAACAATGGATAC′] |
| 1371 | NM_000108.4(DLD): c.1178T > C | 1738 | DLD | [′GACTACAATTGTGTGCCATCAGTGAYTTACA |
| | (p.Ile393Thr) | | | CACACCCTGAAGTTGCTTGG′] |
| 1372 | NM_000170.2(GLDC): c.2T > C | 2731 | GLDC | [′GGGCAGGGGACGGTGGCCGCGGCCAYGCAG |
| | (p.Met1Thr) | | | TCCTGTGCCAGGGCGTGGGGG′] |
| 1373 | NM_000151.3(G6PC): c.229T > C | 2538 | G6PC | [′AGACTGGCTCAACCTCGTCTTTAAGYGGTAA |
| | (p.Trp77Arg) | | | GAACCATATAGAGAGGAGAT′] |
| 1374 | NM_004453.3(ETFDH): c.2T > C | 2110 | ETFDH | [′CCGAGAGTCCTGGTGACTTTGAACAYGCTG |
| | (p.Met1Thr) | | | GTGCCGCTAGCCAAGCTGTCC′] |
| 1375 | NM_000136.2(FANCC): | −1 | — | [′CTGGCCCGAGAGCTCCTTAAAGAGCYGCGA |
| | c.1661T > C (p.Leu554Pro) | | | ACTCAAGTCTAGAAGGCACGC′] |
| 1376 | NM_000131.4(F7): c.38T > C | 2155 | F7 | [′GCCCTCAGGCTCCTCTGCCTTCTGCYTGGGC |
| | (p.Leu13Pro) | | | TTCAGGGCTGCCTGGCTGCA′] |
| 1377 | NM_000131.4(F7): c.983T > C | 2155 | F7 | [′CCCCTCTGCCTGCCCGAACGGACGTYCTCTG |
| | (p.Phe328Ser) | | | AGAGGACGCTGGCCTTCGTG′] |
| 1378 | NM_024649.4(BBS1): c.1553T > | −1 | — | [′ACAACCCGTCCTGTCCTGGGGCTGCYGGTCT |
| | C (p.Leu518Pro) | | | GCTTCCTGTACAACGAGGCG′] |
| 1379 | NM_000490.4(AVP): c.200T > C | 551 | AVP | [′TGCGCGGACGAGCTGGGCTGCTTCGYGGGC |
| | (p.Val67Ala) | | | ACGGCTGAGGCGCTGCGCTGC′] |
| 1380 | NM_000490.4(AVP): c.61T > C | 551 | AVP | [′CCTACTGGCCTTCTCCTCCGCGTGCYACTTC |
| | (p.Tyr21His) | | | CAGAACTGCCCGAGGGGCGG′] |
| 1381 | NM_001692.3(ATP6V1B1): | 525 | ATP6V1B1 | [′GGGACTCAGAGGAGCGGGCAGGTGCYTGAG |
| | c.242T > C (p.Leu81Pro) | | | GTGGCTGGCACCAAGGCGATT′] |
| 1382 | NM_003361.3(UMOD): c.649T > | 7369 | UMOD | [′GGGCGGTGCGCGCATGGCCGAGACCBGCGT |
| | C (p.Cys217Arg) | | | GCCAGTCCTGCGCTGCAACAC′] |
| 1383 | NM_003361.3(UMOD): c.376T > | 7369 | UMOD | [′TAGCCACTGCCACGCCCTGGCCACAYGTGTC |
| | C (p.Cys126Arg) | | | AATGTGGTGGGCAGCTACTT′] |
| 1384 | NM_003361.3(UMOD): c.943T > | 7369 | UMOD | [′CAAATCGAATAATGGCAGATGGCACYGCCA |
| | C (p.Cys315Arg) | | | GTGCAAACAGGACTTCAACAT′] |
| 1385 | NM_080911.2(UNG): c.752T > C | 7374 | UNG | [′AATCAGAACTCGAATGGCCTTGTTTYCTTGC |
| | (p.Phe251Ser) | | | TCTGGGGCTCTTATGCTCAG′] |
| 1386 | NM_199292.2(TH): c.707T > C | 7054 | TH | [′CAGGTGTACCGCCAGCGCAGGAAGCYGATT |
| | (p.Leu236Pro) | | | GCTGAGATCGCCTTCCAGTAC′] |
| 1387 | NM_001065.3(TNFRSF1A): | 7132 | TNFRSF1A | [′CCACCCTCAAAATAATTCGATTTGCYGTACC |
| | c.175T > C (p.Cys59Arg) | | | AAGTGCCACAAAGGTAGGGG′] |
| 1388 | NM_001065.3(TNFRSF1A): | 7132 | TNFRSF1A | [′AATGGGTCAGGTGGAGATCTCTTCTYGCACA |
| | c.349T > C (p.Cys117Arg) | | | GTGGACCGGGACACCGTGTG′] |
| 1389 | NM_000546.5(TP53): c.755T > C | 7157 | TP53 | [′GGCGGCATGAACCGGAGGCCCATCCYCACC |
| | (p.Leu252Pro) | | | ATCATCACACTGGAAGACTCC′] |
| 1390 | NM_000546.5(TP53): c.398T > C | 7157 | TP53 | [′CAGTACTCCCCTGCCCTCAACAAGAYGTTTT |
| | (p.Met133Thr) | | | GCCAACTGGCCAAGACCTGC′] |
| 1391 | NM_000546.5(TP53): c.1031T > C | 7157 | TP53 | [′GAGCGCTTCGAGATGTTCCGAGAGCYGAAT |
| | (p.Leu344Pro) | | | GAGGCCTTGGAACTCAAGGAT′] |
| 1392 | NM_001018005.1(TPM1): | 7168 | TPM1 | [′TCTCTGAACAGACGCATCCAGCTGGYTGAG |
| | c.284T > C (p. Val95Ala) | | | GAAGAGTTGGATCGTGCCCAG′] |
| 1393 | NM_001159287.1(TPI1): | 7167 | TPI1 | [′GGGTGGTGCTTCCCTCAAGCCCGAAYTCGTG |
| | c.832T > C (p.Phe278Leu) | | | GACATCATCAATGCCAAACA′] |
| 1394 | NM_003242.5(TGFBR2): | 7048 | TGFBR2 | [′AAGCATGAGAACATACTCCAGTTCCYGACG |
| | c.923T > C (p.Leu308Pro) | | | GCTGAGGAGCGGAAGACGGAG′] |
| 1395 | NM_000660.5(TGFB1): c.673T > | 7040 | TGFB1 | [′CTTTCGCCTTAGCGCCCACTGCTCCYGTGAC |
| | C (p.Cys225Arg) | | | AGCAGGGATAACACACTGCA′] |
| 1396 | NM_000660.5(TGFB1): c.241T > | 7040 | TGFB1 | [′GCTGCCCGAGGCCGTGCTCGCCCTGYACAA |
| | C (p.Tyr81His) | | | CAGCACCCGCGACCGGGTGGC′] |
| 1397 | NM_000660.5(TGFB1): c.667T > | 7040 | TGFB1 | [′TGAGGGCTTTCGCCTTAGCGCCCACNGCTCC |
| | C (p.Cys223Arg) | | | TGTGACAGCAGGGATAACAC′] |
| 1398 | NM_001128177.1(THRB): | 7068 | THRB | [′ATCATCCTCCTCAAAGGCTGCTGCAYGGAG |
| | c.929T > C (p.Met310Thr) | | | ATCATGTCCCTTCGCGCTGCT′] |
| 1399 | NM_001128177.1(THRB): | 7068 | THRB | [′CCGCTTCCTGCACATGAAGGTGGAAYGCCC |
| | c.1336T > C (p.Cys446Arg) | | | CACAGAACTCTTCCCCCCTTT′] |
| 1400 | NM_001128177.1(THRB): | 7068 | THRB | [′CTCTTCCCCCCTTTGTTCTTGGAAGYGTTCG |
| | 3c.137T > C (p.Val458Ala) | | | AGGATTAGACTGACTGGATT′] |
| 1401 | NM_007313.2(ABL1): c.814T > C | 25 | ABL1 | [′GAAGCACAAGCTGGGCGGGGGCCAGYACGG |
| | (p.Tyr272His) | | | GGAGGTGTACGAGGGCGTGTG′] |
| 1402 | NM_007313.2(ABL1): c.988T > C | 25 | ABL1 | [′AGGGGTCTGCACCCGGGAGCCCCCGYTCTA |
| | (p.Phe330Leu) | | | TATCATCACTGAGTTCATGAC′] |
| 1403 | NM_007313.2(ABL1): c.1109T > | 25 | ABL1 | [′ATGGCCACTCAGATCTCGTCAGCCAYGGAG |
| | C (p.Met370Thr) | | | TACCTGGAGAAGAAAAACTTC′] |
| 1404 | NM_021961.5(TEAD1): | 7003 | TEAD1 | [′TGAACACGGAGCACAACATCATATTYACAG |
| | c.1261T > C (p.Tyr?His) | | | GCTTGTAAAGGACTGAACATG′] |
| 1405 | NM_001256850.1(TTN): | 7273 | TTN | [′TGGATACCCATCCCCGACAGTGACAHGGTA |
| | c.2926T > C (p.Trp976Arg) | | | CAGGGAAGACTACCAAATCGA′] |
| 1406 | NM_133378.4(TTN): c.100163T > | −1 | — | [′GAAAACACAGATGACCTGACAACCCYGATC |
| | C (p.Leu33388Pro) | | | ATCATGGACGTACAGAAACAA′] |
| 1407 | NM_003235.4(TG): c.3733T > C | 7038 | TG | [′CCCCACAGGCTCTGCCATGCAGCAGYGCCA |
| | (p.Cys1245Arg) | | | ATTGCTGTGCCGCCAGGGCTC′] |
| 1408 | NM_003235.4(TG): c.3229T > C | 7038 | TG | [′TCTCTCTCCCACAGGCCCGACAACCYGCGAG |
| | (p.Cys1077Arg) | | | AAATCTCGAACCAGTGGGCT′] |
| 1409 | NM_000733.3(CD3E): | 916 | CD3E | [′CGGGTGCTGGCGGCAGGCAAAGGGGYAAGG |
| | c.520 + 2T > C | | | CTGTGGAGTCCAGTCAGAGGA′] |
| 1410 | NM_003000.2(SDHB): c.487T > C | 6390 | SDHB | [′GCCTTATTTGAAGAAGAAGGATGAAYCTCA |
| | (p.Ser163Pro) | | | GGAAGGCAAGCAGCAGTATCT′] |
| 1411 | NM_003106.3(SOX2): c.290T > C | −1 | — | [′CCGTTCATCGACGAGGCTAAGCGGCYGCGA |
| | (p.Leu97Pro) | | | GCGCTGCACATGAAGGAGCAC′] |
| 1412 | NM_001024858.2(SPTB): | 6710 | SPTB | [′TAATGTCACCAACTTTACCTCCAGCYGGAAG |
| | c.604T > C (p.Trp202Arg) | | | GATGGCTTGGCCTTTAATGC′] |
| 1413 | NM_001024858.2(SPTB): | 6710 | SPTB | [′GGTGTGCCAGTTCTCGAGGGATGCCYCTGTG |
| | c.6055T > C (p.Ser2019Pro) | | | GCTGAGGCGTGGCTGATTGC′] |
| 1414 | NM_003126.2(SPTA1): c.779T > | 6708 | SPTA1 | [′TTGGCTCTCCAGAGACAGAAAGCTCBGTCCA |
| | C (p.Leu260Pro) | | | ATGCTGCAAACTTACAACGA′] |
| 1415 | NM_003126.2(SPTA1): c.781T > | 6708 | SPTA1 | [′GGCTCTCCAGAGACAGAAAGCTCTGYCCAA |
| | C (p.Ser261Pro) | | | TGCTGCAAACTTACAACGATT′] |
| 1416 | NM_003126.2(SPTA1): c.620T > | 6708 | SPTA1 | [′AAATTTGAAGACTTCCAAGTGGAGCYGGTA |
| | C (p.Leu207Pro) | | | GCTAAAGAAGGGAGAGTTGTT′] |
| 1417 | NM_005633.3(SOS1): c.1294T > | 6654 | SOS1 | [′CGAGATTCAGAAGAATATTGATGGTYGGGA |
| | C (p.Trp432Arg) | | | GGGAAAAGACATTGGACAGTG′] |
| 1418 | NM_006920.4(SCN1A): | −1 | — | [′TGTGGAAGAAGGCAGAGGAAAACAAYGGT |
| | c.3577T > C (p.Trp1193Arg) | | | GGAACCTGAGAAGGACGTGTTT′] |
| 1419 | NM_006920.4(SCN1A): | −1 | — | [′TTTGGGTATCTCTCTTTGCTTCAAGYTGTAA |
| | c.4250T > C (p.Val1417Ala) | | | GTGAACACTATTTTCTCTGA′] |
| 1420 | NM_006920.4(SCN1A): c.434T > | 6323 | SCN1A | [′ACTATTTTGACAAACTGTGTGTTTAHGACAA |
| | C (p.Met145Thr) | | | TGAGTAACCCTCCTGATTGG′] |
| 1421 | NM_006920.4(SCN1A): | −1 | — | [′TCTATACTTTGGAGGTCAAGACATCYTTATG |
| | c.4462T > C (p.Phe1488Leu) | | | ACAGAAGAACAGAAGAAATA′] |
| 1422 | NM_152296.4(ATP1A3): | 478 | ATP1A3 | [′GGGCTGGAGGTGGGCAAGACGCCCAHCGCC |
| | c.821T > C (p.Ile274Thr) | | | ATCGAGATTGAGCACTTCATC′] |
| 1423 | NM_152296.4(ATP1A3): | 478 | ATP1A3 | [′CAGCAATATCCCGGAGATCACGCCCYTCCTG |
| | c.2338T > C (p.Phe780Leu) | | | CTGTTCATCATGGCCAACAT′] |
| 1424 | NM_000702.3(ATP1A2): | 477 | ATP1A2 | [′CCTCAGAATCTCCCCACAGGCCGCCYGATCT |
| | c.2291T > C (p.Leu764Pro) | | | TTGACAACTTGAAGAAATCC′] |
| 1425 | NM_000702.3(ATP1A2): | 477 | ATP1A2 | [′ACGGCTACTGGGAATCCGCCTCGACYGGGA |
| | c.2659T > C (p.Trp887Arg) | | | TGACCGGACCATGAATGATCT′] |
| 1426 | NM_000702.3(ATP1A2): | 477 | ATP1A2 | [′AAGAAGGCTGACATTGGCATTGCCAYGGGC |
| | c.2192T > C (p.Met731Thr) | | | ATCTCTGGCTCTGACGTCTCT′] |
| 1427 | NM_000702.3(ATP1A2): | 477 | ATP1A2 | [′GGGCGGACACCCATAGCAATGGAGAYTGAA |
| | c.857T > C (p.Ile286Thr) | | | CACTTCATCCAGCTGATCACA′] |
| 1428 | NM_001035.2(RYR2): c.1298T > | 6262 | RYR2 | [′ATGTTTATGGTTTATTTTAGGGGCCYTGATG |
| | C (p.Leu433Pro) | | | CTCTCAGCAAGAAAGCGAAG′] |
| 1429 | NM_000540.2(RYR1): | 6261 | RYR1 | [′GTGGGTGTCCGGGCTGGCGGAGGCAYTGGG |
| | c.14693T > C (p.Ile4898Thr) | | | GACGAGATCGAGGACCCCGCG′] |
| 1430 | NM_000539.3(RHO): c.133T > C | 6010 | RHO | [′GTTCTCCATGCTGGCCGCCTACATGYTTCTG |
| | (p.Phe45Leu) | | | CTGATCGTGCTGGGCTTCCC′] |
| 1431 | NM_000321.2(RB1): | 5925 | RB1 | [′CTCTTTCACTGTTTTATAAAAAAGGYTAGTA |
| | c.1960 + 2T > C | | | GATGATTATTTTCAAGAGCA′] |
| 1432 | NM_000321.2(RB1): c.2134T > C | 5925 | RB1 | [′TATGATGTGTTCCATGTATGGCATAYGCAAA |
| | (p.Cys712Arg) | | | GTGAAGAATATAGACCTTAA′] |
| 1433 | NM_000329.2(RPE65): c.1022T > | 6121 | RPE65 | [′AGATTTGAGTTTGTTTATAATTACTYATATTT |
| | C (p.Leu341Ser) | | | AGCCAATTTACGTGAGAAC′] |
| 1434 | NM_000322.4(PRPH2): c.554T > | 5961 | PRPH2 | [′ATTCAGTGGATCAGCAATCGCTACCYGGACT |
| | C (p.Leu185Pro) | | | TTTCCTCCAAAGAAGTCAAA′] |
| 1435 | NM_000322.4(PRPH2): c.2T > C | 5961 | PRPH2 | [′CAACCCGGACTACACTTGGCAAGCAYGGCG |
| | (p.Met1Thr) | | | CTACTGAAAGTCAAGTTTGAC′] |
| 1436 | NM_001098668.2(SFTPA2): | 729238 | SFTPA2 | [′ACTGAGGGTCCCAGCCCTGGAGACTYCCGC |
| | c.593T > C (p.Phe198Ser) | | | TACTCAGATGGGACCCCTGTA′] |
| 1437 | NM_003018.3(SFTPC): c.218T > | 6440 | SFTPC | [′TTTCCCCAGGTTCTGGAGATGAGCAHTGGGG |
| | C (p.Ile73Thr) | | | CGCCGGAAGCCCAGCAACGC′] |
| 1438 | NM_003018.3(SFTPC): c.581T > | 6440 | SFTPC | [′AGCACCCTGTGTGGCGAGGTGCCGCYCTACT |
| | C (p.Leu194Pro) | | | ACATCTAGGACGCCTCCGGT′] |
| 1439 | NM_000055.2(BCHE): c.1004T > | 590 | BCHE | [′CTCACTGACATGCCAGACATATTACYTGAAC |
| | C (p.Leu335Pro) | | | TTGGACAATTTAAAAAAACC′] |
| 1440 | NM_002739.3(PRKCG): c.355T > | 5582 | PRKCG | [′CCCCACCTTCTGCGACCACTGTGGCYCCCTC |
| | C (p.Ser119Pro) | | | CTCTACGGGCTTGTGCACCA′] |
| 1441 | NM_002739.3(PRKCG): | 5582 | PRKCG | [′ACAGTGTGGCCGCAGCGGCGAGAACYTTGA |
| | c.1927T > C (p.Phe643Leu) | | | CAAGTTCTTCACGCGGGCGGC′] |
| 1442 | NM_000141.4(FGFR2): | 2263 | FGFR2 | [′TGTAACTTTTGAGGACGCTGGGGAAYATAC |
| | c.1018T > C (p.Tyr340His) | | | GTGCTTGGCGGGTAATTCTAT′] |
| 1443 | NM_000141.4(FGFR2): | 2263 | FGFR2 | [′TTTTGAGGACGCTGGGGAATATACGHGCTTG |
| | c.1024T > C (p.Cys342Arg) | | | GCGGGTAATTCTATTGGGAT′] |
| 1444 | NM_000141.4(FGFR2): c.868T > | 2263 | FGFR2 | [′CAGTGATGCCCAGCCCCACATCCAGBGGAT |
| | C (p.Trp290Arg) | | | CAAGCACGTGGAAAAGAACGG′] |
| 1445 | NM_000141.4(FGFR2): c.799T > | 2263 | FGFR2 | [′CCAAGCCGGACTGCCGGCAAATGCCYCCAC |
| | C (p.Ser267Pro) | | | AGTGGTCGGAGGAGACGTAGA′] |
| 1446 | NM_000506.3(F2): c.1139T > C | 2147 | F2 | [′CCTGCTGCCCCTCCCAGGCAGGTGAYGCTTT |
| | (p.Met380Thr) | | | TCCGGAAGAGTCCCCAGGAG′] |
| 1447 | NM_000313.3(PROS1): | 5627 | PROS1 | [′TTCATTATTTTAAATAGATAATGTABCCAGT |
| | c.1501T > C (p.Ser501Pro) | | | GCTGAGGGTTGGCATGTAAA′] |
| 1448 | NM_002834.3(PTPN11): c.854T > | 5781 | PTPN11 | [′TGACCGTGGTCTCTTTTTCTTCTAGNTGATCA |
| | C (p.Phe285Ser) | | | TACCAGGGTTGTCCTACAC′] |
| 1449 | NM_002755.3(MAP2K1): | 5604 | MAP2K1 | [′CAGCAGCGAAAGCGCCTTGAGGCCTYTCTT |
| | c.158T > C (p.Phe53Ser) | | | ACCCAGAAGCAGAAGGTGGGA′] |
| 1450 | NM_001042465.1(PSAP): | 5660 | PSAP | [′GCTTTTGACAAAATGTGCTCGAAGCYGCCG |
| | c.1055T > C (p.Leu352Pro) | | | AAGTCCCTGTCGGAAGAGTGC′] |
| 1451 | NM_000207.2(INS): c.143T > C | −1 | — | [′TACCTAGTGTGCGGGGAACGAGGCTBCTTCT |
| | (p.Phe48Ser) | | | ACACACCCAAGACCCGCCGG′] |
| 1452 | NM_000311.3(PRNP): c.593T > C | 5621 | PRNP | [′ACCACAACCACCAAGGGGGAGAACTYCACC |
| | (p.Phe198Ser) | | | GAGACCGACGTTAAGATGATG′] |
| 1453 | NM_000371.3(TTR): c. 149T > C | 7276 | TTR | [′GGCAGTCCTGCCATCAATGTGGCCGBGCATG |
| | (p.Val50Ala) | | | TGTTCAGAAAGGCTGCTGAT′] |
| 1454 | NM_000371.3(TTR): c.224T > C | 7276 | TTR | [′AGGAAAACCAGTGAGTCTGGAGAGCYGCAT |
| | (p.Leu75Pro) | | | GGGCTCACAACTGAGGAGGAA′] |
| 1455 | NM_000371.3(TTR): c.88T > C | 7276 | TTR | [′CACCCAGGGCACCGGTGAATCCAAGYGTCC |
| | (p.Cys30Arg) | | | TCTGATGGTCAAAGTTCTAGA′] |
| 1456 | NM_000371.3(TTR): c.272T > C | 7276 | TTR | [′GAATTTGTAGAAGGGATATACAAAGYGGAA |
| | (p.Val91Ala) | | | ATAGACACCAAATCTTACTGG′] |
| 1457 | NM_000371.3(TTR): c.400T > C | 7276 | TTR | [′CACCATTGCCGCCCTGCTGAGCCCCYACTCC |
| | (p.Tyr134His) | | | TATTCCACCACGGCTGTCGT′] |
| 1458 | NM_000371.3(TTR): c.250T > C | 7276 | TTR | [′GCATGGGCTCACAACTGAGGAGGAAYTTGT |
| | (p.Phe84Leu) | | | AGAAGGGATATACAAAGTGGA′] |
| 1459 | NM_000371.3(TTR): c.157T > C | 7276 | TTR | [′TGCCATCAATGTGGCCGTGCATGTGHTCAGA |
| | (p.Phe53Leu) | | | AAGGCTGCTGATGACACCTG′] |
| 1460 | NM_000371.3(TTR): c.95T > C | 7276 | TTR | [′GGCACCGGTGAATCCAAGTGTCCTCYGATG |
| | (p.Leu32Pro) | | | GTCAAAGTTCTAGATGCTGTC′] |
| 1461 | NM_000371.3(TTR): c.191T > C | 7276 | TTR | [′GCTGCTGATGACACCTGGGAGCCATYTGCCT |
| | (p.Phe64Ser) | | | CTGGGTAAGTTGCCAAAGAA′] |
| 1462 | NM_000371.3(TTR): c.265T > C | 7276 | TTR | [′TGAGGAGGAATTTGTAGAAGGGATAYACAA |
| | (p.Tyr89His) | | | AGTGGAAATAGACACCAAATC′] |
| 1463 | NM_000217.2(KCNA1): | 3736 | KCNA1 | [′ATTGCCCTGCCCGTACCTGTCATTGYGTCCA |
| | c.1223T > C (p. Val408Ala) | | | ATTTCAACTATTTCTACCAC′] |
| 1464 | NM_000174.4(GP9): c.212T > C | 2815 | GP9 | [′CTTCAGTCCGTGCCCCCGGGAGCCTBTGACC |
| | (p.Phe71Ser) | | | ACCTGCCCCAGCTGCAGACC′] |
| 1465 | NM_000174.4(GP9): c.167T > C | 2815 | GP9 | [′GCCCTGCCGGCCCGCACCCGCCACCYTCTGC |
| | (p.Leu56Pro) | | | TGGCCAACAACAGCCTTCAG′] |
| 1466 | NM_000174.4(GP9): c.70T > C | 2815 | GP9 | [′GGCCACCAAGGACTGCCCCAGCCCAYGTAC |
| | (p.Cys24Arg) | | | CTGCCGCGCCCTGGAAACCAT′] |
| 1467 | NM_000174.4(GP9): c.20T > C | 2815 | GP9 | [′TGTCCCATGCCTGCCTGGGGAGCCCYGTTCC |
| | (p.Leu7Pro) | | | TGCTCTGGGCCACAGCAGAG′] |
| 1468 | NM_001001547.2(CD36): | 948 | CD36 | [′CGATTTTTAAACAGATGCAGCCTCABTTCCA |
| | c.760T > C (p.Phe254Leu) | | | CCTTTTGTTGAGAAAAGCCA′] |
| 1469 | NM_000212.2(ITGB3): c.2332T > | −1 | — | [′CAACCCACTGTATAAAGAGGCCACGYCTAC |
| | C (p.Ser778Pro) | | | CTTCACCAATATCACGTACCG′] |
| 1470 | NM_000212.2(ITGB3): c.176T > | 3690 | ITGB3 | [′GCTCCTGTCTTACAGGCCCTGCCTCYGGGCT |
| | C (p.Leu59Pro) | | | CACCTCGCTGTGACCTGAAG′] |
| 1471 | NM_000301.3(PLG): c.1771T > C | 5340 | PLG | [′AGGGGGGTGTGTGGCCCACCCACATYCCTG |
| | (p.Ser591Pro) | | | GCCCTGGCAAGTCAGTCTTAG′] |
| 1472 | NM_001122757.2(POU1F1): | 5449 | POU1F1 | [′CAAACTGAAAGCAATATTATCCAAAYGGCT |
| | c.655T > C (p.Trp219Arg) | | | GGAGGAAGCTGAGCAAGTAGG′] |
| 1473 | NM_000293.2(PHKB): c.2923T > | 5257 | PHKB | [′ACCAACCCTGTCAGATATGACCATGHATGA |
| | C (p.Tyr975His) | | | GATGAATTTCTCTCTCCTTGT′] |
| 1474 | NM_004577.3(PSPH): c.155T > C | 5723 | PSPH | [′CTCCCTCCTAGGACACGGCGAGCCAYGGGC |
| | (p.Met52Thr) | | | GGGGCAGTGCCTTTCAAAGCT′] |
| 1475 | NM_000175.3(GPI): c.1574T > C | 2821 | GPI | [′CTGGGAAAGCAGCTGGCTAAGAAAABAGAG |
| | (p.Ile525Thr) | | | CCTGAGCTTGATGGCAGTGCT′] |
| 1476 | NM_000175.3(GPI): c.1016T > C | 2821 | GPI | [′TTTGGGTGTGAGACACACGCCATGCYGCCCT |
| | (p.Leu339Pro) | | | ATGACCAGTACCTGCACCGC′] |
| 1477 | NM_000478.4(ALPL): c.1306T > | 249 | ALPL | [′ACGAGAGAATGTCTCCATGGTGGACYATGG |
| | C (p.Tyr436His) | | | TGAGACCTCCAGGACCCAGGG′] |
| 1478 | NM_000478.4(ALPL): c.979T > C | 249 | ALPL | [′GATCCTGCGGAAGAACCCCAAAGGCYTCTT |
| | (p.Phe327Leu) | | | CTTGCTGGTGGAAGGTAGGGA′] |
| 1479 | NM_018849.2(ABCB4): | 5244 | ABCB4 | [′GGAGTTCAATGATGTTCACTTTTCTYACCCT |
| | c.1207T > C (p.Tyr403His) | | | TCTCGAGCTAACGTCAAGGT′] |
| 1480 | NM_198965.1(PTHLH): c.179T > | 5744 | PTHLH | [′CAAGATTTACGGCGACGATTCTTCCYTCACC |
| | C (p.Leu60Pro) | | | ATCTGATCGCAGAAATCCAC′] |
| 1481 | NM_198965.1(PTHLH): c.131T > | 5744 | PTHLH | [′AGAGCTGTGTCTGAACATCAGCTCCYCCATG |
| | C (p.Leu44Pro) | | | ACAAGGGGAAGTCCATCCAA′] |
| 1482 | NM_000315.2(PTH): c.52T > C | 5741 | PTH | [′AGTTATGATTGTCATGTTGGCAATTYGTTTT |
| | (p.Cys18Arg) | | | CTTACAAAATCGGATGGGAA′] |
| 1483 | NM_000315.2(PTH): c.67T > C | 5741 | PTH | [′GTTGGCAATTTGTTTTCTTACAAAAYCGGAT |
| | (p.Ser23Pro) | | | GGGAAATCTGTTAAGTAAGT′] |
| 1484 | NM_003122.4(SPINK1): c.2T > C | 6690 | SPINK1 | [′ACCTCTGGACGCAGAACTTCAGCCAYGAAG |
| | (p.Met1Thr) | | | GTAACAGGCATCTTTCTTCTC′] |
| 1485 | NM_003122.4(SPINK1): c.41T > | 6690 | SPINK1 | [′ATCTTTCTTCTCAGTGCCTTGGCCCBGTTGA |
| | C (p.Leu14Pro) | | | GTCTATCTGGTAAGTGTTGC′] |
| 1486 | NM_006194.3(PAX9): c.62T > C | 5083 | PAX9 | [′GGAGTGTTCGTGAACGGGAGGCCGCYGCCC |
| | (p.Leu21Pro) | | | AACGCCATCCGGCTTCGCATC′] |
| 1487 | NM_005188.3(CBL): c.1111T > C | 867 | CBL | [′TTAATCAAAGGAACAATATGAATTAHACTG |
| | (p.Tyr371His) | | | TGAGATGGGCTCCACATTCCA′] |
| 1488 | NM_005247.2(FGF3): c.466T > C | 2248 | FGF3 | [′CAGCGCCGAGAGACTGTGGTACGTGYCTGT |
| | (p.Ser156Pro) | | | GAACGGCAAGGGCCGGCCCCG′] |
| 1489 | NM_005247.2(FGF3): c.17T > C | 2248 | FGF3 | [′GATGCCACGATGGGCCTAATCTGGCYGCTA |
| | (p.Leu6Pro) | | | CTGCTCAGCCTGCTGGAGCCC′] |
| 1490 | NM_000222.2(KIT): c.1676T > C | 3815 | KIT | [′CCCATGTATGAAGTACAGTGGAAGGNTGTT |
| | (p.Val559Ala) | | | GAGGAGATAAATGGAAACAAT′] |
| 1491 | NM_005249.4(FOXG1): c.643T > | 2290 | FOXG1 | [′CATCTACGAGTTCATCATGAAGAACYTCCCT |
| | C (p.Phe215Leu) | | | TACTACCGCGAGAACAAGCA′] |
| 1492 | NM_001127500.1(MET): | 4233 | MET | [′CAATTTCTGACCGAGGGAATCATCAYGAAA |
| | c.3446T > C (p.Met1149Thr) | | | GATTTTAGTCATCCCAATGTC′] |
| 1493 | NM_020975.4(RET): c.1858T > C | 5979 | RET | [′CTTCCCTGAGGAGGAGAAGTGCTTCNGCGA |
| | (p.Cys620Arg) | | | GCCCGAAGACATCCAGGGTGA′] |
| 1494 | NM_020975.4(RET): c.1900T > C | 5979 | RET | [′CACAGATCCACTGTGCGACGAGCTGNGCCG |
| | (p.Cys634Arg) | | | CACGGTGATCGCAGCCGCTGT′] |
| 1495 | NM_020975.4(RET): c.2753T > C | 5979 | RET | [′TAGGGTCGGATTCCAGTTAAATGGAYGGCA |
| | (p.Met918Thr) | | | ATTGAATCCCTTTTTGATCAT′] |
| 1496 | NM_020630.4(RET): c.1852T > C | 5979 | RET | [′CAACTGCTTCCCTGAGGAGGAGAAGNGCTT |
| | (p.Cys618Arg) | | | CTGCGAGCCCGAAGACATCCA′] |
| 1497 | NM_020630.4(RET): c.1825T > C | 5979 | RET | [′GGGGATTAAAGCTGGCTATGGCACCNGCAA |
| | (p.Cys609Arg) | | | CTGCTTCCCTGAGGAGGAGAA′] |
| 1498 | NM_013251.3(TAC3): c.269T > C | 6866 | TAC3 | [′ATGCATGACTTCTTTGTGGGACTTAYGGGCA |
| | (p.Met90Thr) | | | AGAGGAGCGTCCAGCCAGGT′] |
| 1499 | NM_006158.4(NEFL): c.281T > C | 4747 | NEFL | [′ATCCGCACGCAGGAGAAGGCGCAGCYCCAG |
| | (p.Leu94Pro) | | | GACCTCAATGACCGCTTCGCC′] |
| 1500 | NM_006177.3(NRL): c.479T > C | 4901 | NRL | [′TGCGGGCGCGACGAGGCGCTGCGGCYGAAG |
| | (p.Leu160Pro) | | | CAGAGGCGCCGCACGCTGAAG′] |
| 1501 | NM_000432.3(MYL2): c.52T > C | 4633 | MYL2 | [′AGCCGGGGGCGCCAACTCCAACGTGYTCTC |
| | (p.Phe18Leu) | | | CATGTTCGAACAGACCCAAAT′] |
| 1502 | NM_000257.3(MYH7): c.1046T > | 4625 | MYH7 | [′TTCACTTCAGAGGAGAAAAACTCCAYGTAT |
| | C (p.Met349Thr) | | | AAGCTGACAGGCGCCATCATG′] |
| 1503 | NM_000257.3(MYH7): c.1594T > | 4625 | MYH7 | [′GCTTCCTCAGCCCATGGGCATCATGYCCATC |
| | C (p.Ser532Pro) | | | CTGGAAGAGGAGTGCATGTT′] |
| 1504 | NM_000257.3(MYH7): c.5378T > | 4625 | MYH7 | [′AACATGGAACAGACCATTAAGGACCYGCAG |
| | C (p.Leu1793Pro) | | | CACCGGCTGGACGAAGCCGAG′] |
| 1505 | NM_001040113.1(MYH11): | 4629 | MYH11 | [′GAGGTGGAACATAAGAAGAAGAAGCYGGA |
| | c.3791T > C (p.Leul264Pro) | | | GGCGCAGGTGCAGGAGCTGCAG′] |
| 1506 | NM_000530.6(MPZ): c.404T > C | 4359 | MPZ | [′TGTGACGTCAAAAACCCTCCAGACAYAGTG |
| | (p.Ile135Thr) | | | GGCAAGACCTCTCAGGTCACG′] |
| 1507 | NM_000530.6(MPZ): c.341T > C | 4359 | MPZ | [′CGCTGGAAGGATGGCTCCATTGTCAYACAC |
| | (p.Ile114Thr) | | | AACCTAGACTACAGTGACAAT′] |
| 1508 | NM_016835.4(MAPT): c.1839T > | 4137 | MAPT | [′AGTCCAAGTGTGGCTCAAAGGATAAYATCA |
| | C (p.Asn613=) | | | AACACGTCCCGGGAGGCGGCA′] |
| 1509 | NM_198159.2(MITF): c.1051T > | 4286 | MITF | [′GAACAAGGGAACCATCTTAAAAGCAYCCGT |
| | C (p.Ser351Pro) | | | GGACTATATCCGAAAGTTGCA′] |
| 1510 | NM_198159.2(MITF): c.1195T > | 4286 | MITF | [′AATGCAGGCTCGAGCTCATGGACTTYCCCTT |
| | C (p.Ser399Pro) | | | ATTCCATCCACGGGTCTCTG′] |
| 1511 | NM_000426.3(LAMA2): | 3908 | LAMA2 | [′ACCAAGAATGAGTCCGGCATCATTCYTTTGG |
| | c.7691T > C (p.Leu2564Pro) | | | GAAGTGGAGGGACACCAGCA′] |
| 1512 | NM_000426.3(LAMA2): | 3908 | LAMA2 | [′ACAACCCTCTGTACCTGGAGGATCAYGTCA |
| | c.2584T > C (p.Cys862Arg) | | | GCCATGCCAATGCAATGACAA′] |
| 1513 | NM_002435.2(MPI): c.413T > C | 4351 | MPI | [′CCCGATGCCAACCACAAGCCAGAGAYGGCC |
| | (p.Met138Thr) | | | ATTGCCCTCACCCCCTTCCAG′] |
| 1514 | NM_000239.2(LYZ): c.221T > C | 4069 | LYZ | [′GGAGACAGAAGCACTGATTATGGGAYATTT |
| | (p.Ile74Thr) | | | CAGATCAATAGCCGCTACTGG′] |
| 1515 | NM_000239.2(LYZ): c.244T > C | 4069 | LYZ | [′GATATTTCAGATCAATAGCCGCTACHGGTGT |
| | (p.Trp82Arg) | | | AATGATGGCAAAACCCCAGG′] |
| 1516 | NM_000233.3(LHCGR): | −1 | — | [′CAATGTGGTGGCCTTCTTCATAATTYGTGCT |
| | c.1627T > C (p.Cys543Arg) | | | TGCTACATTAAAATTTATTT′] |
| 1517 | NM_000233.3(LHCGR): | −1 | — | [′AAACTTACAGTGCCTCGTTTTCTCAYGTGCA |
| | c.1193T > C (p.Met398Thr) | | | ATCTCTCCTTTGCAGACTTT′] |
| 1518 | NM_000233.3(LHCGR): c.391T > | −1 | — | [′TCCTGTCCCTAATCACAGGAGCATCYGTAAC |
| | C (p.Cys131Arg) | | | ACAGGCATCAGAAAGTTTCC′] |
| 1519 | NM_000233.3(LHCGR): | −1 | — | [′GACTTCCTTAGGGTCCTGATTTGGCYGATTA |
| | c.1103T > C (p.Leu368Pro) | | | ATATTCTAGCCATCATGGGA′] |
| 1520 | NM_000233.3(LHCGR): | −1 | — | [′TCTTCTCTAATTGCTATGTTGCCCCYTGTCGG |
| | c.1505T > C (p.Leu502Pro) | | | TGTCAGCAATTACATGAAG′] |
| 1521 | NM_170707.3(LMNA): c.1589T > | 4000 | LMNA | [′TGCGGGAACAGCCTGCGTACGGCTCYCATC |
| | C (p.Leu530Pro) | | | AACTCCACTGGGGAAGTAAGT′] |
| 1522 | NM_170707.3(LMNA): c.1139T > | 4000 | LMNA | [′GAGATCCACGCCTACCGCAAGCTCTYGGAG |
| | C (p.Leu380Ser) | | | GGCGAGGAGGAGAGGTGGGCT′] |
| 1523 | NM_002292.3(LAMB2): c.961T > | 3913 | LAMB2 | [′CAAACACAACACACGTGGCCTCAACYGCGA |
| | C (p.Cys321Arg) | | | GCAGTGTCAGGATTTCTATCG′] |
| 1524 | NM_000228.2(LAMB3): | 3914 | LAMB3 | [′AAATCCATAAGGTTAAGTTGGACCTRCAGA |
| | c.565 − 3T > C | | | GGGAAGGGAAAGAGAAGCGCT′] |
| 1525 | NM_000421.3(KRT10): c.482T > | −1 | — | [′CTGAATGACCGCCTGGCTTCCTACTYGGACA |
| | C (p.Leu161Ser) | | | AAGTTCGGGCTCTGGAAGAA′] |
| 1526 | NM_000421.3(KRT10): c.449T > | −1 | — | [′CTCTCTGGAAATGAAAAAGTAACCABGCAG |
| | C (p.Met150Thr) | | | AATCTGAATGACCGCCTGGCT′] |
| 1527 | NM_000422.2(KRT17): c.263T > | 3872 | KRT17 | [′CTGGCTGGAGGTGAGAAGGCCACCAHGCAG |
| | C (p.Met88Thr) | | | AACCTCAATGACCGCCTGGCC′] |
| 1528 | NM_000422.2(KRT17): c.284T > | 3872 | KRT17 | [′ACCATGCAGAACCTCAATGACCGCCHGGCC |
| | C (p.Leu95Pro) | | | TCCTACCTGGACAAGGTGCGT′] |
| 1529 | NM_000422.2(KRT17): c.296T > | 3872 | KRT17 | [′CTCAATGACCGCCTGGCCTCCTACCYGGACA |
| | C (p.Leu99Pro | | | AGGTGCGTGCCCTGGAGGAG′] |
| 1530 | NM_005557.3(KRT16): c.395T > | 3868 | KRT16 | [′CTCAATGACCGCCTGGCCTCCTACCYGGACA |
| | C (p.Leu132Pro) | | | AGGTGCGTGCTCTGGAGGAG′] |
| 1531 | NM_005557.3(KRT16): c.362T > | 3868 | KRT16 | [′CTGGTGGGCAGTGAGAAGGTGACCAHGCAG |
| | C (p.Met121Thr) | | | AACCTCAATGACCGCCTGGCC′] |
| 1532 | NM_000526.4(KRT14): | 3861 | KRT14 | [′ATGATTGGCAGCGTGGAGGAGCAGCYGGCC |
| | c.1151T> C (p.Leu384Pro) | | | CAGCTCCGCTGCGAGATGGAG′] |
| 1533 | NM_000526.4(KRT14): c.356T > | 3861 | KRT14 | [′CTGGTGGGCAGTGAGAAGGTGACCAYGCAG |
| | C (p.Met119Thr) | | | AACCTCAATGACCGCCTGGCC′] |
| 1534 | NM_000526.4(KRT14): | 3861 | KRT14 | [′GCGGCTGGAGCAGGAGATCGCCACCYACCG |
| | c.1243T > C (p.Tyr415His) | | | CCGCCTGCTGGAGGGCGAGGA′] |
| 1535 | NM_153490.2(KRT13): c.356T > | 3860 | KRT13 | [′CTCAACGACCGCCTGGCTTCCTACCYGGAGA |
| | C (p.Leu119Pro) | | | AGGTGCGCGCCCTGGAGGAG′] |
| 1536 | NM_002273.3(KRT8): c.160T > C | 3856 | KRT8 | [′CTTTCGCGGTGGCCTGGGCGGCGGCHATGGT |
| | (p.Tyr54His) | | | GGGGCCAGCGGCATGGGAGG′] |
| 1537 | NM_000424.3(KRT5): c.1388T > | 3852 | KRT5 | [′GAGCTCATGAACACCAAGCTGGCCCYGGAC |
| | C (p.Leu463Pro) | | | GTGGAGATCGCCACTTACCGC′] |
| 1538 | NM_000424.3(KRT5): c.980T > C | 3852 | KRT5 | [′TCTGACACCTCAGTGGTCCTCTCCAHGGACA |
| | (p.Met327Thr) | | | ACAACCGCAACCTGGACCTG′] |
| 1539 | NM_000424.3(KRT5): c.20T > C | 3852 | KRT5 | [′GCCACCATGTCTCGCCAGTCAAGTGYGTCCT |
| | (p.Val7Ala) | | | TCCGGAGCGGGGGCAGTCGT′] |
| 1540 | NM_000424.3(KRT5): c.541T > C | 3852 | KRT5 | [′CAAGACCCTCAACAATAAGTTTGCCYCCTTC |
| | (p.Ser181Pro) | | | ATCGACAAGGTGAGCTACGA′] |
| 1541 | NM_000208.2(INSR): c.779T > C | 3643 | INSR | [′TGCGTGGCCTGCCGCAACTTCTACCYGGACG |
| | (p.Leu260Pro) | | | GCAGGTGTGTGGAGACCTGC′] |
| 1542 | NM_000208.2(INSR): c.164T > C | 3643 | INSR | [′TTGCATGAGCTGGAGAATTGCTCTGYCATCG |
| | (p.Val55Ala) | | | AAGGACACTTGCAGATACTC′] |
| 1543 | NM_002198.2(IRF1): c.31T > C | 3659 | IRF1 | [′CATCACTCGGATGCGCATGAGACCCYGGCT |
| | (p.Trp11Arg) | | | AGAGATGCAGATTAATTCCAA′] |
| 1544 | NM_000213.3(ITGB4): c.467T > | 3691 | ITGB4 | [′AACCTCAAGAAGATGGGGCAGAACCYGGGT |
| | C (p.Leu156Pro) | | | ACGGCAGGGCCAGAGTGGAGG′] |
| 1545 | NM_000213.3(ITGB4): c.1684T > | 3691 | ITGB4 | [′CCGAGGACGCTGCTCCATGGGCCAGYGTGT |
| | C (p.Cys562Arg) | | | GTGTGAGCCTGGTTGGACAGG′] |
| 1546 | NM_000213.3(ITGB4): c.112T > | 3691 | ITGB4 | [′CTGCAAGAAGGCCCCAGTGAAGAGCYGCAC |
| | C (p.Cys38Arg) | | | GGAGTGTGTCCGTGTGGATAA′] |
| 1547 | NM_000454.4(SOD1): c.338T > C | 6647 | SOD1 | [′ATCTCACTCTCAGGAGACCATTGCAYCATTG |
| | (p.Ile113Thr) | | | GCCGCACACTGGTGGTAAGT′] |
| 1548 | NM_000454.4(SOD1): c.434T > C | 6647 | SOD1 | [′AAGACAGGAAACGCTGGAAGTCGTTYGGCT |
| | (p.Leu145Ser) | | | TGTGGTGTAATTGGGATCGCC′] |
| 1549 | NM_000454.4(SOD1): c.455T > C | 6647 | SOD1 | [′CGTTTGGCTTGTGGTGTAATTGGGAYCGCCC |
| | (p.Ile152Thr) | | | AATAAACATTCCCTTGGATG′] |
| 1550 | NM_001025107.2(ADAR): | 103 | ADAR | [′ACCAGACTTTCTTTTTGTAGGTTTCYCTACA |
| | c.1883T > C (p.Leu628Pro) | | | GTGAGTTAATGAAATACAAC′] |
| 1551 | NM_001025107.2(ADAR): | 103 | ADAR | [′TCCAAAAAGAACATTTTTCTTCTATYTAAGA |
| | c.2609T > C (p.Phe870Ser) | | | AGCTCTGCTCCTTCCGTTAC′] |
| 1552 | NM_002185.3(IL7R): c.197T > C | 3575 | IL7R | [′CCATATTTCAAATTCCAGATTGGTGRTGTTG |
| | (p.Ile66Thr) | | | ACATCTGGGTCCTCAAAAGC′] |
| 1553 | NM_033500.2(HK1): c.1550T > C | 3098 | HK1 | [′ACTGCAACAGAGAATGGTGACTTCTYGGCC |
| | (p.Leu517Ser) | | | CTGGATCTTGGAGGAACCAAT′] |
| 1554 | NM_000184.2(HBG2): | 3048 | HBG2 | [′CTTCCCCACACTATCTCAATGCAAAYATCTG |
| | c.−228T > C | | | TCTGAAACGGTCCCTGGCTA′] |
| 1555 | NM_000184.2(HBG2): c.125T > C | 3048 | HBG2 | [′GTTGTCTACCCATGGACCCAGAGGTYCTTTG |
| | (p.Phe42Ser) | | | ACAGCTTTGGCAACCTGTCC′] |
| 1556 | NM_000559.2(HBG1): | 3047 | HBG1 | [′TAGCAGTATCCTCTTGGGGGCCCCTYCCCCA |
| | c.−251T > C | | | CACTATCTCAATGCAAATAT′] |
| 1557 | NM_000519.3(HBD): c.−127T > C | 3045 | HBD | [′TCTCACAAACTAATGAAACCCTGCTYATCTT |
| | | | | AAACCAACCTGCTCACTGGA′] |
| 1558 | NM_000518.4(HBB): c.257T > C | 3043 | HBB | [′CACCTGGACAACCTCAAGGGCACCTYTGCC |
| | (p.Phe86Ser) | | | ACACTGAGTGAGCTGCACTGT′] |
| 1559 | NM_000518.4(HBB): c.128T > C | 3043 | HBB | [′GTCTACCCTTGGACCCAGAGGTTCTBTGAGT |
| | (p.Phe43Ser) | | | CCTTTGGGGATCTGTCCACT′] |
| 1560 | NM_000518.4(HBB): c.337T > C | 3043 | HBB | [′ACAGCTCCTGGGCAACGTGCTGGTCYGTGTG |
| | (p.Cys113Arg) | | | CTGGCCCATCACTTTGGCAA′] |
| 1561 | NM_000518.4(HBB): c.127T > C | 3043 | HBB | [′GGTCTACCCTTGGACCCAGAGGTTCBTTGAG |
| | (p.Phe43Leu) | | | TCCTTTGGGGATCTGTCCAC′] |
| 1562 | NM_000518.4(HBB): c.332T > C | 3043 | HBB | [′CTCCCACAGCTCCTGGGCAACGTGCYGGTCT |
| | (p.Leul11Pro) | | | GTGTGCTGGCCCATCACTTT′] |
| 1563 | NM_000518.4(HBB): | 3043 | HBB | [′GGTGGTGAGGCCCTGGGCAGGTTGGHATCA |
| | c.92 + 6T > C | | | AGGTTACAAGACAGGTTTAAG′] |
| 1564 | NM_000518.4(HBB): c.344T > C | 3043 | HBB | [′CTGGGCAACGTGCTGGTCTGTGTGCYGGCCC |
| | (p.Leu115Pro) | | | ATCACTTTGGCAAAGAATTC′] |
| 1565 | NM_000517.4(HBA2): c.427T > C | 3040 | HBA2 | [′CACCGTGCTGACCTCCAAATACCGTNAAGCT |
| | (p.Ter143Gln) | | | GGAGCCTCGGTAGCCGTTCC′] |
| 1566 | NM_000517.4(HBA2): c.2T > C | 3040 | HBA2 | [′CCACAGACTCAGAGAGAACCCACCAYGGTG |
| | (p.Met1Thr) | | | CTGTCTCCTGCCGACAAGACC′] |
| 1567 | NM_000517.4(HBA2): c.89T > C | 3040 | HBA2 | [′GCTGGCGAGTATGGTGCGGAGGCCCYGGAG |
| | (p.Leu30Pro) | | | AGGTGAGGCTCCCTCCCCTGC′] |
| 1568 | NM_006121.3(KRT1): c.482T > C | 3848 | KRT1 | [′CAAGAAGTCACTATCAACCAGAGCCYTCTTC |
| | (p.Leul61Pro) | | | AGCCCCTCAATGTGGAGATT′] |
| 1569 | NM_006121.3(KRT1): c.1436T > | 3848 | KRT1 | [′ACCAAGCTGGCCCTGGATCTGGAGAYTGCC |
| | C (p.Ile479Thr) | | | ACCTACAGGACCCTCCTGGAG′] |
| 1570 | NM_006121.3(KRT1): c.1424T > | 3848 | KRT1 | [′GAGCTGATGAACACCAAGCTGGCCCYGGAT |
| | C (p.Leu475Pro) | | | CTGGAGATTGCCACCTACAGG′] |
| 1571 | NM_001077488.3(GNAS): | 2778 | GNAS | [′AAAGTGCAGGACATCAAAAACAACCYGAAA |
| | c.299T > C (p.Leu100Pro) | | | GAGGCGATTGAAGTACGTGCT′] |
| 1572 | NM_000515.4(GH1): | 2688 | GH1 | [′AGGAAACACAACAGAAATCCGTGAGYGGAT |
| | c.291 + 6T > C | | | GCCTTCTCCCCAGGCGGGGAT′] |
| 1573 | NM_002087.3(GRN): c.2T > C | 2896 | GRN | [′TCCTTGGTACTTTGCAGGCAGACCAYGTGGA |
| | (p.Met1Thr) | | | CCCTGGTGAGCTGGGTGGCC′] |
| 1574 | NM_021957.3(GYS2): c.1447T > | 2998 | GYS2 | [′GGTGATTTTGCACCCAGAGTTTCTAYCCTCC |
| | C (p.Ser483Pro) | | | ACCAGTCCCTTACTACCCAT′] |
| 1575 | NM_001083112.2(GPD2): | 2820 | GPD2 | [′AGGTATAAGAAGAGATTTCATAAGTYTGAT |
| | c.1904T > C (p.Phe635Ser) | | | GCAGACCAGAAAGGCTTTATT′] |
| 1576 | NM_000340.1(SLC2A2): | 6514 | SLC2A2 | [′ATCTTCATGTCAGTGGGACTTGTGCBGCTGG |
| | c.1166T > C (p.Leu389Pro) | | | TAAGTTTGGTGCCTGCACTG′] |
| 1577 | NM_005271.3(GLUD1): | 2746 | GLUD1 | [′GTGTTCTTTTCCCTAATAGGGTGCAYCTGAG |
| | c.1501T > C (p.Ser501Pro) | | | AAAGACATCGTGCACTCTGG′] |
| 1578 | NM_000162.3(GCK): c.391T > C | 2645 | GCK | [′CTTCGACTACATCTCTGAGTGCATCYCCGAC |
| | (p.Ser131Pro) | | | TTCCTGGACAAGCATCAGAT′] |
| 1579 | NM_001018077.1(NR3C1): | 2908 | NR3C1 | [′CTCAACATGTTAGGAGGGCGGCAAGYGATT |
| | c.1712T > C (p.Val571Ala) | | | GCAGCAGTGAAATGGGCAAAG′] |
| 1580 | NM_001018077.1(NR3C1): | 2908 | NR3C1 | [′TCAAATGGAAATATCAAAAAACTTCYGTTTC |
| | c.2318T > C (p.Leu773Pro) | | | ATCAAAAGTGACTGCCTTAA′] |
| 1581 | NM_001018077.1(NR3C1): | 2908 | NR3C1 | [′GGTTGAAAATCTCCTTAACTATTGCYTCCAA |
| | c.2209T > C (p.Phe737Leu) | | | ACATTTTTGGATAAGACCAT′] |
| 1582 | NM_002055.4(GFAP): c.1055T > | 2670 | GFAP | [′CGCCACTTGCAGGAGTACCAGGACCYGCTC |
| | C (p.Leu352Pro) | | | AATGTCAAGCTGGCCCTGGAC′] |
| 1583 | NM_002353.2(TACSTD2): | 4070 | TACSTD2 | [′CGGCTCTTCCGCGAGCGCTATCGGCYGCACC |
| | c.557T > C (p.Leu186Pro) | | | CCAAGTTCGTGGCGGCCGTG′] |
| 1584 | NM_000821.6(GGCX): c.896T > | 2677 | GGCX | [′TTTCTCCCTGCTTTCCTAGGTATGTYCTCCTA |
| | C (p.Phe299Ser) | | | CGTCATGCTGGCCAGCAGC′] |
| 1585 | NM_000145.3(FSHR): c.479T > C | 2492 | FSHR | [′CAAGATAACATAAACATCCACACAAYTGAA |
| | (p.Ile160Thr) | | | AGAAATTCTTTCGTGGGGCTG′] |
| 1586 | NM_000145.3(FSHR): c.1634T > | 2492 | FSHR | [′CTCAATGTCCTGGCCTTTGTGGTCAYCTGTG |
| | C (p.Ile545Thr) | | | GCTGCTATATCCACATCTAC′] |
| 1587 | NM_182925.4(FLT4): c.3131T > C | 2324 | FLT4 | [′AGAGACCTGGCTGCTCGGAACATTCYGCTGT |
| | (p.Leu1044Pro) | | | CGGAAAGCGACGTGGTGAAG′] |
| 1588 | NM_182925.4(FLT4): c.3257T > C | 2324 | FLT4 | [′CTGAAGTGGATGGCCCCTGAAAGCAYCTTC |
| | (p.Ile1086Thr) | | | GACAAGGTGTACACCACGCAG′] |
| 1589 | NM_023110.2(FGFR1): c.899T > | 2260 | FGFR1 | [′CACATCGAGGTGAATGGGAGCAAGAYTGGC |
| | C (p.Ile300Thr) | | | CCAGACAACCTGCCTTATGTC′] |
| 1590 | NM_023110.2(FGFR1): | 2260 | FGFR1 | [′CCTGTACCTGGAGATCATCATCTATYGCACA |
| | c.1141T > C (p.Cys381Arg) | | | GGGGCCTTCCTCATCTCCTG′] |
| 1591 | NM_000138.4(FBN1): c.4987T > | 2200 | FBN1 | [′TCCTGGAATCTGTGGTCCAGGGACAYGTTAC |
| | C (p.Cys1663Arg) | | | AACACCGTTGGCAACTACAC′] |
| 1592 | NM_000138.4(FBN1): c.3220T > | 2200 | FBN1 | [′CTGTTTTTGTGCAGACATTGACGAAYGCCGC |
| | C (p.Cys1074Arg) | | | ATATCTCCTGACCTCTGTGG′] |
| 1593 | NM_000138.4(FBN1): c.3793T > | 2200 | FBN1 | [′TATCCCTGGAGAGTACAGGTGCTTGYGTTAT |
| | C (p.Cys1265Arg) | | | GATGGATTCATGGCATCTGA′] |
| 1594 | NM_000043.4(FAS): c.532T > C | 355 | FAS | [′ATCCAGATCTAACTTGGGGTGGCTTYGTCTT |
| | (p.Cys178Arg) | | | CTTCTTTTGCCAATTCCACT′] |
| 1595 | NM_000043.4(FAS): | 355 | FAS | [′CATGAATCTCCAACTTTAAATCCTGHAGGTA |
| | c.651 + 2T > C | | | TTGAAATAGGTATCAGCTTT′] |
| 1596 | NM_000129.3(F13A1): c.728T > C | 2162 | F13A1 | [′ATCCTGGACACTTGCCTGTATGTGAYGGACA |
| | (p.Met243Thr) | | | GAGCACAAATGGACCTCTCT′] |
| 1597 | NM_000186.3(CFH): c.1606T > C | 3075 | CFH | [′GCTGAATGACACATTGGACTATGAAYGCCA |
| | (p.Cys536Arg) | | | TGATGGTTATGAAAGCAATAC′] |
| 1598 | NM_000123.3(ERCC5): | −1 | — | [′AAGTTAATAAATTTGGCTTATTTGCYTGGAA |
| | c.2573T > C (p.Leu858Pro) | | | GTGATTATACCGAAGGAATA′] |
| 1599 | NM_000122.1(ERCC3): c.296T > | 2071 | ERCC3 | [′CCAGTTTACAAATATGCCCAAGACTYCTTGG |
| | C (p.Phe99Ser) | | | TGGCTATTGCAGAGCCAGTG′] |
| 1600 | NM_001113755.2(TYMP): | 1890 | TYMP | [′CTGGGTCGCTGCGTGGGCCACGCCCYGGAG |
| | c.854T > C (p.Leu285Pro) | | | GTGGAGGAGGCGCTGCTCTGC′] |
| 1601 | NM_000118.3(ENG): c.2T > C | 2022 | ENG | [′CGCACAGGCCCCCACGTGGACAGCAYGGAC |
| | (p.Met1Thr) | | | CGCGGCACGCTCCCTCTGGCT′] |
| 1602 | NM_203342.2(EPB41): c.2T > C | 2035 | EPB41 | [′AAACCAATCAGAAAACACAGGAACABGCAC |
| | (p.Met1Thr) | | | TGCAAGGTTTCTTTGTTGGAT′] |
| 1603 | NM_001972.2(ELANE): c.211T > | 1991 | ELANE | [′CAACTTCGTCATGTCGGCCGCGCACYGCGTG |
| | C (p.Cys71Arg) | | | GCGAATGTGTGAGTAGCCGG′] |
| 1604 | NM_000400.3(ERCC2): | 2068 | ERCC2 | [′ACCATGGCAACCTTCACCATGACGCYGGCA |
| | c.1454T > C (p.Leu485Pro) | | | CGGGTCTGCCTCTGCCCTATG′] |
| 1605 | NM_000281.3(PCBD1): c.244T > | 5092 | PCBD1 | [′CCACATCACGCTGAGCACCCATGAGYGTGC |
| | C (p.Cys82Arg) | | | CGGCCTTTCAGAACGGGACAT′] |
| 1606 | NM_001927.3(DES): c.1034T > C | 1674 | DES | [′CCCCCTCTCCTGCAGAACGATTCCCYGATGA |
| | (p.Leu345Pro) | | | GGCAGATGCGGGAATTGGAG′] |
| 1607 | NM_001927.3(DES): c.1154T > C | 1674 | DES | [′CTCAAGGATGAGATGGCCCGCCATCYGCGC |
| | (p.Leu385Pro) | | | GAGTACCAGGACCTGCTCAAC′] |
| 1608 | NM_000498.3(CYP11B2): | −1 | — | [′GTTCTGAAGCACCAAGTCTGAGCTCRCCACT |
| | c.1157T > C (p.Val386Ala) | | | CGCTCCAAAAACAGACCCAC′] |
| 1609 | NM_000498.3(CYP11B2): | −1 | — | [′CGGCGCCTGGCAGAGGCAGAGATGCYGCTG |
| | c.1382T > C (p.Leu461Pro) | | | CTGCTGCACCACGTAAGCAGG′] |
| 1610 | NM_001886.2(CRYBA4): | 1413 | CRYBA4 | [′TACCCCGCCGAGAGGCTCACCTCCTYCCGGC |
| | c.281T > C (p.Phe94Ser) | | | CTGCGGCCTGTGCTGTAAGT′] |
| 1611 | NM_001886.2(CRYBA4): | 1413 | CRYBA4 | [′GGCTTCCAAGGGCAGCAGTACATTCYGGAA |
| | c.206T > C (p.Leu69Pro) | | | CGAGGCGAATATCCAAGCTGG′] |
| 1612 | NM_000762.5(CYP2A6): | −1 | — | [′GCAACCCCAGCTCTATGAGATGTTCYCTTCG |
| | c.670T > C (p.Ser224Pro) | | | GTGATGAAACACCTGCCAGG′] |
| 1613 | NM_000165.4(GJA1): c.52T > C | 2697 | GJA1 | [′ACTCCTTGACAAGGTTCAAGCCTACYCAACT |
| | (p.Ser18Pro) | | | GCTGGAGGGAAGGTGTGGCT′] |
| 1614 | NM_000165.4(GJA1): c.32T > C | 2697 | GJA1 | [′GACTGGAGCGCCTTAGGCAAACTCCYTGAC |
| | (p.Leu11Pro) | | | AAGGTTCAAGCCTACTCAACT′] |
| 1615 | NM_004004.5(GJB2): c.101T > C | 2706 | GJB2 | [′CTCCTTTGCAGCCACAACGAGGATCVTAATG |
| | (p.Met34Thr) | | | CGAAAAATGAAGAGGACGGT′] |
| 1616 | NM_004004.5(GJB2): c.229T > C | 2706 | GJB2 | [′CTTCCCCATCTCCCACATCCGGCTAYGGGCC |
| | (p.Trp77Arg) | | | CTGCAGCTGATCTTCGTGTC′] |
| 1617 | NM_004004.5(GJB2): c.269T > C | 2706 | GJB2 | [′ATCTTCGTGTCCACGCCAGCGCTCCYAGTGG |
| | (p.Leu90Pro) | | | CCATGCACGTGGCCTACCGG′] |
| 1618 | NM_005215.3(DCC): c.503T > C | 1630 | DCC | [′AAGTGTGAAGTCATTGGGGAGCCCAYGCCA |
| | (p.Met168Thr) | | | ACAATCCACTGGCAGAAGAAC′] |
| 1619 | NM_001849.3(COL6A2): | 1292 | COL6A2 | [′GAGTGAAAACCTCTACTCCATCGCCYGCGA |
| | c.2329T > C (p.Cys777Arg) | | | CAAGCCACAGCAGGTGCGCAA′] |
| 1620 | NM_000090.3(COL3A1): c.582 + | 1281 | COL3A1 | [′CTGGTCATCCTGGTTCCCCTGTAAGHATAGC |
| | 6T > C | | | CATTGGTGGTGTTTTCTTCC′] |
| 1621 | NM_000089.3(COL1A2): c.279 + | 1278 | COL1A2 | [′GTTGGACTTGGCCCTGGACCAATGGYATGCT |
| | 2T > C | | | TATCTGTTTATCTTAGCCAA′] |
| 1622 | NM_000089.3(COL1A2): | 1278 | COL1A2 | [′TTGCAAGGTCTGCCTGGTATCGCTGYAAGTA |
| | c.3105 + 2T > C | | | AACTGTAGCCATCTCGCACA′] |
| 1623 | NM_000088.3(COL1A1): | 1277 | COL1A1 | [′TTCGACGTTGGCCCTGTCTGCTTCCYGTAAA |
| | c.4391T > C (p.Leu1464Pro) | | | CTCCCTCCATCCCAACCTGG′] |
| 1624 | NM_000493.3(COL10A1): | −1 | — | [′AAAGGGACTCATGTTTGGGTAGGCCYGTAT |
| | c.1841T > C (p.Leu614Pro) | | | AAGAATGGCACCCCTGTAATG′] |
| 1625 | NM_000493.3(COL10A1): | −1 | — | [′TGACCCAAGGACTGGAATCTTTACTYGTCAG |
| | c.1771T > C (p.Cys591Arg) | | | ATACCAGGAATATACTATTT′] |
| 1626 | NM_000493.3(COL10A1): | −1 | — | [′CGATCTCACAGAAAATGACCAGGTGYGGCT |
| | 1c.195T > C (p.Trp651Arg) | | | CCAGCTTCCCAATGCCGAGTC′] |
| 1627 | NM_000493.3(COL10A1): | −1 | — | [′ATACTCCTCTGAGTATGTCCACTCCYCTTTCT |
| | c.2011T > C (p.Ser671Pro) | | | CAGGATTCCTAGTGGCTCC′] |
| 1628 | NM_000493.3(COL10A1): | −1 | — | [′TCAGATACCAGGAATATACTATTTTYCATAC |
| | c.1798T > C (p.Ser600Pro) | | | CACGTGCATGTGAAAGGGAC′] |
| 1629 | NM_020549.4(CHAT): c.629T > C | 1103 | CHAT | [′ATGTATCTCAACAACCGCCTGGCCCYGCCTG |
| | (p.Leu210Pro) | | | TCAACTCCAGCCCTGCCGTG′] |
| 1630 | NM_020549.4(CHAT): c.914T > C | 1103 | CHAT | [′ATCATGCCGGAGCCTGAGCACGTCABCGTA |
| | (p.Ile305Thr) | | | GCCTGCTGCAATCAGGTAAGC′] |
| 1631 | NM_020549.4(CHAT): c.1007T > | 1103 | CHAT | [′GATCTGTTCACTCAGTTGAGAAAGAYAGTC |
| | C (p.Ile336Thr) | | | AAAATGGCTTCCAACGAGGAC′] |
| 1632 | NM_001822.5(CHN1): c.427T > C | 1123 | CHN1 | [′TGCCAAGATGACGATAAACCCAATTYATGA |
| | (p.Tyr143His) | | | GCACGTAGGATACACAACCTT′] |
| 1633 | NM_001904.3(CTNNB1): | 1499 | CTNNB1 | [′TTCTGGTGCCACTACCACAGCTCCTBCTCTG |
| | c.133T> C (p.Ser45Pro) | | | AGTGGTAAAGGCAATCCTGA′] |
| 1634 | NM_004056.4(CA8): c.298T > C | 767 | CA8 | [′ACATATATTTTCTTTTTCAGTTCTTYCGGGAG |
| | (p.Ser100Pro) | | | GACCATTGCCTCAAGGGCA′] |
| 1635 | NM_016124.4(RHD): c.329T > C | 6007 | RHD | [′CCTTCTGGGAAGGTGGTCATCACACYGTTCA |
| | (p.Leu110Pro) | | | GGTATTGGGATGGTGGCTGG′] |
| 1636 | NM_015865.6(SLC14A1): | 6563 | SLC14A1 | [′CTTTGGACTCTGGGGTTTCAACAGCYCTCTG |
| | c.871T > C (p.Ser291Pro) | | | GCCTGCATTGCAATGGGAGG′] |
| 1637 | NM_001250.5(CD40): c.247T > C | 958 | CD40 | [′GACACACTGCCACCAGCACAAATACYGCGA |
| | (p.Cys83Arg) | | | CCCCAGTGCGTGCGCTGTTGG′] |
| 1638 | NM_000342.3(SLC4A1): | 6521 | SLC4A1 | [′AGTGTGCGGCTCCCCCACAGGCCTGYCCATC |
| | c.2317T > C (p.Ser773Pro) | | | CTCATGGAGCCCATCCTGTC′] |
| 1639 | NM_001681.3(ATP2A2): | 488 | ATP2A2 | [′GGGTAGTGGCAGCGACACACTGCGAYGCCT |
| | c.1678T > C (p.Cys560Arg) | | | GGCCCTGGCCACTCATGACAA′] |
| 1640 | NM_001082971.1(DDC): | 1644 | DDC | [′TCCCCACAAATGGCTATTGGTGAATYTTGAC |
| | c.925T > C (p.Phe309Leu) | | | TGTTCTGCCATGTGGTAAGT′] |
| 1641 | NM_031226.2(CYP19A1): | −1 | — | [′ATACAAAAAGTATGAGAAGTCTGTGYAAGT |
| | c.743 + 2T > C | | | AATACAACTTTGGAAGATTTA′] |
| 1642 | NM_000486.5(AQP2): c.646T > C | −1 | — | [′ACCCCTGGTGGGCGCCATCCTGGGCYCCCTC |
| | (p.Ser216Pro) | | | CTCTACAACTACGTGCTGTT′] |
| 1643 | NM_000041.3(APOE): c.388T > C | 348 | APOE | [′GCTGGGCGCGGACATGGAGGACGTGYGCGG |
| | (p.Cys130Arg) | | | CCGCCTGGTGCAGTACCGCGG′] |
| 1644 | NM_000041.3(APOE): c.137T > C | 348 | APOE | [′TGGCAGAGCGGCCAGCGCTGGGAACYGGCA |
| | (p.Leu46Pro) | | | CTGGGTCGCTTTTGGGATTAC′] |
| 1645 | NM_000039.1(APOA1): c.220T > | −1 | — | [′CTCCAGCCTAAAGCTCCTTGACAACYGGGA |
| | C (p. Trp74Arg) | | | CAGCGTGACCTCCACCTTCAG′] |
| 1646 | NM_000039.1(APOA1): c.341T > | −1 | — | [′CTGAGGCAGGAGATGAGCAAGGATCYGGAG |
| | C (p.Leul14Pro) | | | GAGGTGAAGGCCAAGGTGCAG′] |
| 1647 | NM_000039.1(APOA1): c.593T > | 335 | APOA1 | [′TACAGCGACGAGCTGCGCCAGCGCTYGGCC |
| | C (p.Leu198Ser) | | | GCGCGCCTTGAGGCTCTCAAG′] |
| 1648 | NM_000416.2(IFNGR1): | 3459 | IFNGR1 | [′AATATTTCTCATCATTATTGTAATAYTTCTG |
| | c.260T > C (p.Ile87Thr) | | | ATCATGTTGGTGATCCATCA′] |
| 1649 | NM_000488.3(SERPINC1): | 462 | SERPINC1 | [′TGTCGATCTGTTCAGCCCTGAAAAGYCCAAA |
| | c.1141T > C (p.Ser381Pro) | | | CTCCCAGGTTTGTCTAGGAA′] |
| 1650 | NM_000488.3(SERPINC1): | 462 | SERPINC1 | [′GTTTGACACCATATCTGAGAAAACAYCTGAT |
| | c.442T > C (p.Ser148Pro) | | | CAGATCCACTTCTTCTTTGC′] |
| 1651 | NM_000488.3(SERPINC1): | 462 | SERPINC1 | [′AAGGTTTATCTTTTGTCCTTGCTGCYCATTG |
| | Tc.68 > C (p.Leu23Pro) | | | GCTTCTGGGACTGCGTGACC′] |
| 1652 | NM_000488.3(SERPINC1): | 462 | SERPINC1 | [′CAGAGCGGCCATCAACAAATGGGTGYCCAA |
| | Tc.667 > C (p.Ser223Pro) | | | TAAGACCGAAGGCCGAATCAC′] |
| 1653 | NM_000488.3(SERPINC1): | 462 | SERPINC1 | [′TTTTGCTATGACCAAGCTGGGTGCCYGTAAT |
| | c.379T > C (p.Cys127Arg) | | | GACACCCTCCAGCAACTGAT′] |
| 1654 | NM_001085.4(SERPINA3): | 12 | SERPINA3 | [′GATAAGAATGTCATCTTCTCCCCACYGAGCA |
| | 3c.23T > C (p.Leu78Pro) | | | TCTCCACCGCCTTGGCCTTC′] |
| 1655 | NM_000341.3(SLC3A1): | 6519 | SLC3A1 | [′AATCAGTATGTCAACGTGATGAACAHGCTTC |
| | c.1400T > C (p.Met467Thr) | | | TTTTCACACTCCCTGGAACT′] |
| 1656 | NM_000341.3(SLC3A1): | −1 | — | [′AATCGAGCATGCTATTCCAGTGTACYGAAC |
| | c.2033T > C (p.Leu678Pro) | | | ATACTGTATACCTCGTGTTAG′] |
| 1657 | NM_000021.3(PSEN1): c.749T > | 5663 | PSEN1 | [′CCTGAATGGACTGCGTGGCTCATCTYGGCTG |
| | C (p.Leu250Ser) | | | TGATTTCAGTATATGGTAAA′] |
| 1658 | NM_000021.3(PSEN1): c.338T > | 5663 | PSEN1 | [′TTTTATACCCGGAAGGATGGGCAGCYGTAC |
| | C (p.Leu113Pro) | | | GTATGAGTTTTGTTTTATTAT′] |
| 1659 | NM_000021.3(PSEN1): c.497T > | 5663 | PSEN1 | [′CTTTTCTAGGTCATCCATGCCTGGCBTATTAT |
| | C (p.Leu166Pro) | | | ATCATCTCTATTGTTGCTG′] |
| 1660 | NM_000021.3(PSEN1): c.254T > | 5663 | PSEN1 | [′TATGGCGCCAAGCATGTGATCATGCYCTTTG |
| | C (p.Leu85Pro) | | | TCCCTGTGACTCTCTGCATG′] |
| 1661 | NM_001151.3(SLC25A4): | 291 | SLC25A4 | [′GCCTTCAAGGACAAGTACAAGCAGCYCTTC |
| | c.293T > C (p.Leu98Pro) | | | TTAGGGGGTGTGGATCGGCAT′] |
| 1662 | NM_001100.3(ACTA1): c.287T > | 58 | ACTA1 | [′TGGCACCACACCTTCTACAACGAGCYTCGCG |
| | C (p.Leu96Pro) | | | TGGCTCCCGAGGAGCACCCC′] |
| 1663 | NM_001100.3(ACTA1): c.668T > | 58 | ACTA1 | [′AAGGAGAAGCTGTGCTACGTGGCCCYGGAC |
| | C (p.Leu223Pro) | | | TTCGAGAACGAGATGGCGACG′] |
| 1664 | NM_000485.2(APRT): c.407T > C | 353 | APRT | [′CTCACCCTCCCATCCCCAGGAACCAYGAAC |
| | (p.Met136Thr) | | | GCTGCCTGTGAGCTGCTGGGC′] |
| 1665 | NM_000485.2(APRT): c.329T > C | 353 | APRT | [′CACCACTTCCCACTCCAGGCTGAGCYGGAG |
| | (p.Leu110Pro) | | | ATTCAGAAAGACGCCCTGGAG′] |
| 1666 | NM_001614.3(ACTG1): | 71 | ACTG1 | [′TACGACGAGTCGGGCCCCTCCATCGYCCACC |
| | c.1109T > C (p.Val370Ala) | | | GCAAATGCTTCTAAACGGAC′] |
| 1667 | NM_000751.2(CHRND): | 1144 | CHRND | [′CCGGCTGAAGTGGAATGCTGAAGAAYTTGG |
| | c.283T > C (p.Phe95Leu) | | | AAACATCAGTGTCCTGCGCCT′] |
| 1668 | NM_000751.2(CHRND): | 1144 | CHRND | [′GCCCTGGCCCTCACACTCTCCAACCYCATCT |
| | c.188T > C (p.Leu63Pro) | | | CCCTGGTGAGAGGCCCTCCG′] |
| 1669 | NM_001039523.2(CHRNA1): | 1134 | CHRNA1 | [′CTCTGTCTTACTGTCTTTGACTGTGYTCCTTC |
| | c.901T > C (p.Phe301Leu) | | | TGGTCATCGTGGAGCTGAT′] |
| 1670 | NM_001004127.2(ALG11): | 440138 | ALG11 | [′GGAGAAAGAGTTTTATGGTGTGCTTYAAGA |
| | c.257T > C (p.Leu86Ser) | | | GCCCTGCAGAAAAAGTAGGTA′] |
| 1671- | NM_002036.3(ACKR1): | 2532 | ACKR1 | [′AGAGGGAGCTAGGAGGCTAGCATAGRAAGG |
| 1674 | c.−67T > C | | | AGARAAGGAAAAAGACTTTGA′, |
| | | | | ′TATAAAGACTGAGGGGCAAACAGCASGGGA |
| | | | | AATGAGGGGCATAGGGATAAG′, |
| | | | | ′CGCAGACAGAAGGGCTGGGACGGCTRTCAG |
| | | | | CGCCTGTGCTTCCAAGRTAAG′, |
| | | | | ′ATCAGGAAGCCTTACCCCACGCCCAYTGCCT |
| | | | | GCACAAGCCTCAGGCCTATG′] |
| 1675 | NM_014053.3(FLVCR1): | 28982 | FLVCR1 | [′CAACTGCCTGGGTGCCTGGATCAAGYGCGG |
| | c.574T > C (p.Cys192Arg) | | | CAGTGTGCAGCAGCATCTCTT′] |
| 1676 | NM_004268.4(MED17): | 9440 | MED17 | [′TGTCCGGAGGACCACCTTTATGTCCYAGAGC |
| | c.1112T> C (p.Leu371Pro) | | | ATAATTTGCATCTACTGATT′] |
| 1677 | NM_024411.4(PDYN): c.632T > C | 5173 | PDYN | [′CTGTACAAACGCTATGGGGGCTTCTYGCGGC |
| | (p.Leu211Ser) | | | GCATTCGTCCCAAGCTCAAG′] |
| 1678 | NM_000018.3(ACADVL): | 37 | ACADVL | [′GTGAAGGAGAAGATCACAGCTTTTGYGGTG |
| | c.848T > C (p. Val283Ala) | | | GAGAGGGGCTTCGGGGGCATT′] |
| 1679 | NM_000021.3(PSEN1): c.1175T > | 5663 | PSEN1 | [′GGAGATTTCATTTTCTACAGTGTTCYGGTTG |
| | C (p.Leu392Pro) | | | GTAAAGCCTCAGCAACAGCC′] |
| 1680 | NM_000083.2(CLCN1): c.857T > | 1180 | CLCN1 | [′CCACACTTCTGTGCCCCTGCAGGAGYGCTAT |
| | C (p.Val286Ala) | | | TTAGCATCGAGGTCACCTCC′] |
| 1681 | NM_000083.2(CLCN1): c.920T > | 1180 | CLCN1 | [′GTTCGGAACTACTGGAGAGGATTCTYTGCA |
| | C (p.Phe307Ser) | | | GCCACGTTCAGCGCCTTTGTG′] |
| 1682 | NM_000157.3(GBA): c.703T > C | 2629 | GBA | [′CAATGGAGCGGTGAATGGGAAGGGGYCACT |
| | (p.Ser235Pro) | | | CAAGGGACAGCCCGGAGACAT′] |
| 1683 | NM_000166.5(GJB1): c.145T > C | 2705 | GJB1 | [′AGAGAGTGTGTGGGGTGATGAGAAAYCTTC |
| | (p.Ser49Pro) | | | CTTCATCTGCAACACACTCCA′] |
| 1684- | NM_000186.3(CFH): c.3590T > C | 3075 | CFH | [′ATATCCCCGTTTACACACAAATTCARCTGAT |
| 1686 | (p.Val1197Ala) | | | TCACCTGTTCTCGAATAAAG′, |
| | | | | ′GAACTTATCATTGCTGCTTTTGATTaagatat |
| | | | | tggtcaaagagtacaaact′, |
| | | | | ′ttcagctataatatgaataagaacttggaatc |
| | | | | aaacatagagatctagtga′] |
| 1687 | NM_000195.4(HPS1): c.2003T > | 3257 | HPS | [′GGGGATGACAGACAGGTGCAGGGCCRGCAG |
| | C (p.Leu668Pro) | | | CTCGTAGCACCTGACAGCCTC′] |
| 1688 | NM_000195.4(HPS1): c.716T > C | 3257 | HPST | [′GCTGGGGTAGAGGTCCTGAACCAGGRGGAT |
| | (p.Leu239Pro) | | | GAGGGCAAGCAGGTCGGCCGG′] |
| 1689 | NM_000334.4(SCN4A): | 6329 | SCN4A | [′CCTCTTCAACATCGGCCTCCTCCTCYTCCTG |
| | c.4468T > C (p.Phe1490Leu) | | | GTCATGTTCATCTACTCCAT′] |
| 1690 | NM_000352.4(ABCC8): c.257T > | 6833 | ABCC8 | [′ACCTTCATGCTGCTCTTCGTCCTGGBGTGTG |
| | C (p.Val86Ala) | | | AGATTGCAGAGGGCATCCTG′] |
| 1691 | NM_000352.4(ABCC8): c.404T > | 6833 | ABCC8 | [′ATCGAGACTTCCAACTTCCCCAAGCYGCTAA |
| | C (p.Leu135Pro) | | | TTGGTAGGTGAGGTGTAGGA′] |
| 1692 | NM_000352.4(ABCC8): c.674T > | 6833 | ABCC8 | [′TTCCTGCAGCCCTTCGTGAATCTGCYGTCCA |
| | C (p.Leu225Pro) | | | AAGGCACCTACTGGTGGATG′] |
| 1693 | NM_000430.3(PAFAH1B1): | 5048 | PAFAH1B1 | [′ATTACTTCATAATATATTGCTGTTAYGTGTTT |
| | c.569 − 10T > C | | | TAGGCCATGACCACAATGT′] |
| 1694 | NM_000525.3(KCNJ11): | 3767 | KCNJ11 | [′CCGTGCCCGCCAGCGGAGGGCCCGCBTTGT |
| | c.103T > C (p.Phe35Leu) | | | GTCCAAGAAAGGCAACTGCAA′] |
| 1695 | NM_000525.3(KCNJ11): | 3767 | KCNJ11 | [′GTGGGTGGCAACAGCATCTTCCTGGYGGCC |
| | c.755T > C (p. Val252Ala) | | | CCGCTGATCATCTACCATGTC′] |
| 1696 | NM_000528.3(MAN2B1): | 4125 | MAN2B1 | [′GGCAGCAGCCTGAGAGATGGCTCGCYGGAG |
| | c.2426T > C (p.Leu809Pro) | | | CTCATGGTGAGTGGGTCAGAG′] |
| 1697 | NM_001034850.2(FAM134B): | 54463 | FAM134B | [′GACTTTTCAGCTCTTTGTCCTAAGGYATTTTT |
| | c.873 + 2T > C | | | TGTTTAGTTTTCAATTTGT′] |
| 1698 | NM_001457.3(FLNB): c.4804T > | 2317 | FLNB | [′CTACGGGGGTGACGACATCCCACTTYCTCCT |
| | C (p.Ser1602Pro) | | | TATCGCATCCGAGCCACACA′] |
| 1699 | NM_002863.4(PYGL): c.2461T > | 5836 | PYGL | [′CTCCAGTGACCGAACAATTAAAGAAYATGC |
| | C (p.Tyr821His) | | | CCAAAACATCTGGAACGTGGA′] |
| 1700 | NM_003002.3(SDHD): c.284T > C | 6392 | SDHD | [′CCTTGCTCTGCGATGGACTATTCCCYGGCTG |
| | (p.Leu95Pro) | | | CAGCCCTCACTCTTCATGGT′] |
| 1701 | NM_004385.4(VCAN): | 1462 | VCAN | [′TAAGTATTGTGAAAACTCTGTTTTTHTCAGG |
| | c.4004 − 5T > C | | | TCGAATGAGTGATTTGAGTG′] |
| 1702 | NM_004519.3(KCNQ3): c.925T > | 3786 | KCNQ3 | [′TGAGACCTATGCAGATGCCCTGTGGYGGGG |
| | C (p.Trp309Arg) | | | CCTGGTGAGTCACTACCTTGG′] |
| 1703 | NM_004937.2(CTNS): c.473T > C | 1497 | CTNS | [′TCCACCCCCTGCAGTGTCATTGGTCYGAGCT |
| | (p.Leu158Pro) | | | TCGACTTCGTGGCTCTGAAC′] |
| 1704 | NM_006329.3(FBLN5): c.649T > | 10516 | FBLN5 | [′GAACGAGTGTGCCACCGAGAACCCCYGCGT |
| | C (p.Cys217Arg) | | | GCAAACCTGCGTCAACACCTA′] |
| 1705 | NM_006432.3(NPC2): c.295T > C | 10577 | NPC2 | [′TGATGGTTGTAAGAGTGGAATTAACYGCCCT |
| | (p.Cys99Arg) | | | ATCCAAAAAGACAAGACCTA′] |
| 1706 | NM_007375.3(TARDBP): | 23435 | TARDBP | [′CATGGTAAGTATATTGTAAAATACAYATGTA |
| | c.*83T > C | | | CTAAGAATTTTCAAAATTGG′] |
| 1707 | NM_013246.2(CLCF1): c.46T > C | −1 | — | [′CTCGTGGGGGATGTTAGCGTGCCTGYGCAC |
| | (p.Cys16Arg) | | | GGTGCTCTGGCACCTCCCTGC′] |
| 1708 | NM_013246.2(CLCF1): c.676T > | −1 | — | [′CCTGCACCTGGGGGCTCATGGCTTCYGACTT |
| | C (p.Ter226Arg) | | | CTGACCTTCTCCTCTTCGCT′] |
| 1709 | NM_024577.3(SH3TC2): | 79628 | SH3TC2 | [′CTGCCCTTTGCCGAGCGCCTGCAGCYCCTCT |
| | c.1982T > C (p.Leu661Pro) | | | CTGGACACCCTCCTGCCTCT′] |
| 1710 | NM_172107.2(KCNQ2): c.2T > C | 3785 | KCNQ2 | [′CCGGGGCGCCTCCCGCCAGGCACCAYGGTG |
| | (p.Met1Thr) | | | CAGAAGTCGCGCAACGGCGGC′] |
| 1711 | NM_004304.4(ALK): c.3749T > C | 238 | ALK | [′TGCATTTCCTTTCTTCCCAGAGACAYTGCTG |
| | (p.Ile1250Thr) | | | CCAGAAACTGCCTCTTGACC′] |
| 1712 | NM_000495.4(COL4A5): | 1287 | COL4A5 | [′TTCCTTCTCCTTTTCCTTTACCAGAYGTGCAG |
| | c.4690T > C (p.Cys1564Arg) | | | TATGTGAAGCTCCAGCTGT′] |
| 1713 | NM_000495.4(COL4A5): | 1287 | COL4A5 | [′CTTTTCCTTTACCAGATGTGCAGTAYGTGAA |
| | c.4699T > C (p.Cys1567Arg) | | | GCTCCAGCTGTGGTGATCGC′] |
| 1714 | NM_000495.4(COL4A5): | 1287 | COL4A5 | [′CAGTCAGACGATCCAGATTCCCCATYGTCCT |
| | c.4756T > C (p.Cys1586Arg) | | | CAGGGATGGGATTCTCTGTG′] |
| 1715 | NM_000495.4(COL4A5): | 1287 | COL4A5 | [′TAAGAAGCTTAAACTTCAAACAGCTYCTATC |
| | c.4803 + 121T > C | | | CAAGCACTGTGTTCCCCCTC′] |
| 1716 | NM_000495.4(COL4A5): | 1287 | COL4A5 | [′AGACTTGAGGACACGAATTAGCCGAYGTCA |
| | c.5032T > C (p.Cys1678Arg) | | | AGTGTGCATGAAGAGGACATA′] |
| 1717 | NM_005359.5(SMAD4): c.970T > | 4089 | SMAD4 | [′ATTTCCTATAGCTCCTGAGTATTGGYGTTCC |
| | C (p.Cys324Arg) | | | ATTGCTTACTTTGAAATGGA′] |
| 1718 | NM_005359.5(SMAD4): | 4089 | SMAD4 | [′GGACCCTTCTGGAGGAGATCGCTTTYGTTTG |
| | c.1087T > C (p.Cys363Arg) | | | GGTCAACTCTCCAATGTCCA′] |
| 1719 | NM_005359.5(SMAD4): | 4089 | SMAD4 | [′ATTGAAATTCACTTACACCGGGCCCBCCAGC |
| | c.1598T > C (p.Leu533Pro) | | | TCCTAGACGAAGTACTTCAT′] |
| 1720 | NM_020630.4(RET): c.1831T > C | 5979 | RET | [′TAAAGCTGGCTATGGCACCTGCAACNGCTTC |
| | (p.Cys611Arg) | | | CCTGAGGAGGAGAAGTGCTT′] |
| 1721 | NM_020630.4(RET): c.1888T > C | 5979 | RET | [′ACCACCCCCACCCACAGATCCACTGYGCGA |
| | (p.Cys630Arg) | | | CGAGCTGTGCCGCACGGTGAT′] |
| 1722 | NM_000060.3(BTD): c.248T > C | 686 | BTD | [′GCTCTCATCAGCCGCCAAGAGGCCTYGGAG |
| | (p.Leu83Ser) | | | CTCATGAACCAGAACCTTGAC′] |
| 1723 | NM_000060.3(BTD): c.445T > C | 686 | BTD | [′GAACCCATGCCTGGAGCCTCACCGCYTCAAT |
| | (p.Phe149Leu) | | | GACACAGAGGTGATTCCTGC′] |
| 1724 | NM_000060.3(BTD): c.743T > C | 686 | BTD | [′TTTGGCATCTTCACATGCTTTGATAYATTGTT |
| | (p.Ile248Thr) | | | CTTTGACCCTGCCATCAGA′] |
| 1725 | NM_000060.3(BTD): c.764T > C | 686 | BTD | [′GATATATTGTTCTTTGACCCTGCCAYCAGAG |
| | (p.Ile255Thr) | | | TCCTCAGAGACTACAAGGTG′] |
| 1726 | NM_000060.3(BTD): c.833T > C | 686 | BTD | [′ACTGCCTGGATGAACCAGCTCCCACYCTTGG |
| | (p.Leu278Pro) | | | CAGCAATTGAGATTCAGAAA′] |
| 1727 | NM_000060.3(BTD): c.1096T > C | 686 | BTD | [′CCATAGTAAGTTTTTAAAAATTTTGYCAGGC |
| | (p.Ser366Pro) | | | GATCCGTACTGTGAGAAGGA′] |
| 1728 | NM_000060.3(BTD): c.1214T > C | 686 | BTD | [′GAGATGATGTATGACAATTTCACCCYGGTCC |
| | (p.Leu405Pro) | | | CTGTCTGGGGAAAGGAAGGC′] |
| 1729 | NM_000060.3(BTD): c.1252T > C | 686 | BTD | [′GGGAAAGGAAGGCTATCTCCACGTCYGTTC |
| | (p.Cys418Arg) | | | CAATGGCCTCTGCTGTTATTT′] |
| 1730 | NM_000060.3(BTD): c.1267T > C | 686 | BTD | [′TCTCCACGTCTGTTCCAATGGCCTCYGCTGT |
| | (p.Cys423Arg) | | | TATTTACTTTACGAGAGGCC′] |
| 1731 | NM_000060.3(BTD): c.1459T > C | 686 | BTD | [′CACGGGGATATTTGAGTTTCACCTGYGGGGC |
| | (p.Trp487Arg) | | | AACTTCAGTACTTCCTATAT′] |
| 1732 | NM_000155.3(GALT): c.265T > C | 2592 | GALT | [′TCCTTGTCGGTAGGTGAATCCCCAGBACGAT |
| | (p.Tyr89His) | | | AGCACCTTCCTGTTTGACAA′] |
| 1733 | NM_000155.3(GALT): | 2592 | GALT | [′TGCAGCCTGATGCCCCCAGTCCAGGYAACCT |
| | c.328 + 2T > C | | | GGCTCCAACTGCTGCTGGGG′] |
| 1734 | NM_000155.3(GALT): c.336T > C | 2592 | GALT | [′GATACTCCTTTACCTCAGGACCCAGYGATCA |
| | (p.Ser112=) | | | TCCCCTTTTCCAAGCAAAGT′] |
| 1735 | NM_000155.3(GALT): c.350T > C | 2592 | GALT | [′TCAGGACCCAGTGATCATCCCCTTTYCCAAG |
| | (p.Phe117Ser) | | | CAAAGTCTGCTCGAGGAGTC′] |
| 1736 | NM_000155.3(GALT): c.374T > C | 2592 | GALT | [′TTCCAAGCAAAGTCTGCTCGAGGAGYCTGG |
| | (p.Val125Ala) | | | TAACTATGGATTTCCCCTCTT′] |
| 1737 | NM_000155.3(GALT): c.425T > C | 2592 | GALT | [′TGGTCGGATGTAACGCTGCCACTCAHGTCGG |
| | (p.Met142Thr) | | | TCCCTGAGATCCGGGCTGTT′] |
| 1738 | NM_000155.3(GALT): c.452T > C | 2592 | GALT | [′TCGGTCCCTGAGATCCGGGCTGTTGYTGATG |
| | (p.Val151Ala) | | | CATGGGCCTCAGTCACAGAG′] |
| 1739 | NM_000155.3(GALT): c.460T > C | 2592 | GALT | [′TGAGATCCGGGCTGTTGTTGATGCABGGGCC |
| | (p.Trp154Arg) | | | TCAGTCACAGAGGAGCTGGG′] |
| 1740 | NM_000155.3(GALT): c.482T > C | 2592 | GALT | [′GCATGGGCCTCAGTCACAGAGGAGCYGGGT |
| | (p.Leu161Pro) | | | GCCCAGTACCCTTGGGTGCAG′] |
| 1741 | NM_000155.3(GALT): c.499T > C | 2592 | GALT | [′AGAGGAGCTGGGTGCCCAGTACCCTYGGGT |
| | (p.Trp167Arg) | | | GCAGGTTTGTGAGGTCGCCCC′] |
| 1742 | NM_000155.3(GALT): | 2592 | GALT | [′GGTGCCCAGTACCCTTGGGTGCAGGYTTGTG |
| | c.507 + 2T > C | | | AGGTCGCCCCTTCCCCTGGA′] |
| 1743 | NM_000155.3(GALT): c.509T > C | 2592 | GALT | [′GAGCTCCGTATCCCTATCTGATAGAHCTTTG |
| | (p.Ile170Thr) | | | AAAACAAAGGTGCCATGATG′] |
| 1744 | NM_000155.3(GALT): c.584T > C | 2592 | GALT | [′TGACAGGTATGGGCCAGCAGTTTCCYGCCA |
| | (p.Leu195Pro) | | | GATATTGCCCAGCGTGAGGAG′] |
| 1745 | NM_000155.3(GALT): c.650T > C | 2592 | GALT | [′TATAAGAGTCAGCATGGAGAGCCCCYGCTA |
| | (p.Leu217Pro) | | | ATGGAGTACAGCCGCCAGGAG′] |
| 1746 | NM_000155.3(GALT): c.677T > C | 2592 | GALT | [′CTAATGGAGTACAGCCGCCAGGAGCYACTC |
| | (p.Leu226Pro) | | | AGGAAGGTGGGAGAGAGCCAA′] |
| 1747 | NM_000155.3(GALT): | 2592 | GALT | [′AGCCGCCAGGAGCTACTCAGGAAGGYGGGA |
| | c.687 + 2T > C | | | GAGAGCCAAGCCCTGTGTCCC′] |
| 1748 | NM_000155.3(GALT): c.745T > C | 2592 | GALT | [′AGTACTGGTCCCCTTCTGGGCAACAYGGCCC |
| | (p.Trp249Arg) | | | TACCAGACACTGCTGCTGCC′] |
| 1749 | NM_000155.3(GALT): c.967T > C | 2592 | GALT | [′CCATTGGCAGCTGCACGCTCATTACBACCCT |
| | (p.Tyr323His) | | | CCGCTCCTGCGCTCTGCCAC′] |
| 1750 | NM_000155.3(GALT): c.980T > C | 2592 | GALT | [′CACGCTCATTACTACCCTCCGCTCCYGCGCT |
| | (p.Leu327Pro) | | | CTGCCACTGTCCGGAAATTC′] |
| 1751 | NM_000155.3(GALT): c.1138T > | 2592 | GALT | [′GGACAGGGAGACAGCAACCATCGCCYGACC |
| | C (p.Ter380Arg) | | | ACGCCGACCACAGGGCCTTGA′] |
| 1752 | NM_207346.2(TSEN54): | 283989 | TSEN54 | [′AGAAGAGGGCTTCGTGGAGTTGAAGYCTCC |
| | c.277T > C (p.Ser93Pro) | | | CGCGGTGAGCGGCGGGCTCGG′] |
| 1753 | NM_016269.4(LEF1): c.181T > C | −1 | — | [′CATCAAGTCTTCCTTGGTGAACGAGYCTGAA |
| | (p.Ser61Pro) | | | ATCATCCCGGCCAGCAACGG′] |
| 1754 | NM_001928.2(CFD): c.640T > C | 1675 | CFD | [′GGGTGACTCCGGGGGCCCGCTGGTGYGCGG |
| | (p.Cys214Arg) | | | GGGCGTGCTCGAGGGCGTGGT′] |
| 1755 | NM_001458.4(FLNC): c.752T > C | 2318 | FLNC | [′CCCAACGTGGATGAGCATTCTGTTAYGACCT |
| | (p.Met251Thr) | | | ACCTGTCCCAGTTCCCCAAG′] |
| 1756 | NM_000781.2(CYP11A1): | 1583 | CYP11A1 | [′ATTTTTGGGGAGCGCCAGGGGATGCYGGAG |
| | c.665T > C (p.Leu222Pro) | | | GAAGTAGTGAACCCCGAGGCC′] |
| 1757- | NM_000782.4(CYP24A1): | 1591 | CYP24A1 | [′ATAATAATGATGGTTGccaacatgcgctgag |
| 1761 | c.1226T > C (p.Leu409Ser) | | | tgcttaaaatgtgccaggta′, |
| | | | | ′ataaataggtaaagggctttagaattgtgcac |
| | | | | catactcacaaccaccctg′, |
| | | | | ′cgcagcagattctgttattaaaccccttttac |
| | | | | agacgaagttgaggctcac′, |
| | | | | ′agagattatgtaactcactcaagacaacacag |
| | | | | ataaaagatgaaactgaat, |
| | | | | ′ACAAATTCTACTTACTCCTTTGGGTRAAGCAT |
| | | | | ATTCACCCAGAACTGTTGC′] |
| 1762 | NM_001145661.1(GATA2): | 2624 | GATA2 | [′CAACGGGGACCCTGTCTGCAACGCCYGTGG |
| | c.1117T > C (p.Cys373Arg) | | | CCTCTACTACAAGCTGCACAA′] |
| 1763 | NM_004523.3(KIF11): | 3832 | KIF11 | [′CAGGAACTTCACAACTTATTGGAGGYAATA |
| | c.2547 + 2T > C | | | ACTTTGTAAGTGGAACTTACT′] |
| 1764 | NM_000238.3(KCNH2): | 3757 | KCNH2 | [′GGGCGGCCCCTCCATCAAGGACAAGBATGT |
| | c.1831T > C (p.Tyr611His) | | | GACGGCGCTCTACTTCACCTT′] |
| 1765 | NM_002465.3(MYBPC1): | 4604 | MYBPC1 | [′GGAGGAAGAACCCCAGGTGGACGTAYGGGA |
| | c.706T > C (p.Trp236Arg) | | | GTTGCTGAAGAACGCGAAACC′] |
| 1766 | NM_002465.3(MYBPC1): | 4604 | MYBPC1 | [′CATTCCAAGACACCTGAAGCAAACCYATAT |
| | c.2566T > C (p.Tyr856His) | | | CCGCAGAGTTGGAGAAGCTGT′] |
| 1767 | NM_005211.3(CSF1R): c.2624T > | 1436 | CSF1R | [′AAACTGGTGAAGGATGGATACCAAAYGGCC |
| | C (p.Met875Thr) | | | CAGCCTGCATTTGCCCCAAAG′] |
| 1768 | NM_005211.3(CSF1R): c.2381T > | 1436 | CSF1R | [′TTGACCAATGGTCATGTGGCCAAGAYTGGG |
| | C (p.Ile794Thr) | | | GACTTCGGGCTGGCTAGGGAC′] |
| 1769 | NM_003392.4(WNT5A): | 7474 | WNT5A | [′GCCGCGGGACTGGCTCTGGGGCGGCYGCGG |
| | c.544T > C (p.Cys182Arg) | | | CGACAACATCGACTATGGCTA′] |
| 1770 | NM_005188.3(CBL): c.1150T > C | 867 | CBL | [′CTCCACATTCCAACTATGTAAAATABGTGCT |
| | (p.Cys384Arg) | | | GAAAATGATAAGGATGTAAA′] |
| 1771 | NM_005188.3(CBL): c.1186T > C | 867 | CBL | [′TGATAAGGATGTAAAGATTGAGCCCYGTGG |
| | (p.Cys396Arg) | | | ACACCTCATGTGCACATCCTG′] |
| 1772 | NM_006902.4(PRRX1): c.338T > | 5396 | PRRX1 | [′CAGCTGCAGGCTTTGGAGCGTGTCTYTGAGC |
| | C (p.Phe113Ser) | | | GGACACACTATCCTGATGCT′] |
| 1773 | NM_001111035.1(ACP5): | −1 | — | [′GCGGCGGCCAGGGAGGACTACGTGCYGGTG |
| | c.602T > C (p.Leu201Pro) | | | GCTGGCCACTACCCCGTGTGG′] |
| 1774 | NM_000329.2(RPE65): c.1102T > | 6121 | RPE65 | [′GGCTCCCCAACCTGAAGTTAGGAGAYATGT |
| | C (p.Tyr368His) | | | ACTTCCTTTGAATATTGACAA′] |
| 1775 | NM_003172.3(SURF1): c.679T > | 6834 | SURF1 | [′TGAGAACAATCCAGAAAGGAACCACYGGCA |
| | C (p.Trp227Arg) | | | TTATCGAGACCTGGAAGCTAT′] |
| 1776 | NM_002734.4(PRKARIA): | 5573 | PRKARIA | [′CATCCTCAAACGAAACATCCAGCAGYACAA |
| | c.1117T > C (p.Tyr373His) | | | CAGTTTTGTGTCACTGTCTGT′] |
| 1777 | NM_002734.4(PRKARIA): | 5573 | PRKARIA | [′CCATCTTTGCTTTCTCCAGGTGAAAYTGCAC |
| | c.980T > C (p.Ile327Thr) | | | TACTGATGAATCGTCCTCGT′] |
| 1778 | NM_003491.3(NAA10): c.109T > | 8260 | NAA10 | [′GAAATACTACTTCTACCATGGCCTTYCCTGG |
| | C (p.Ser37Pro) | | | CCCCAGGTGGGCAGCTTCTG′] |
| 1779 | NM_006306.3(SMC1A): | 8243 | SMC1A | [′GTGTTTGAAGAGTTTTGTCGGGAGAYTGGTG |
| | c.2351T> C (p.Ile784Thr) | | | TGCGCAACATCCGGGAGTTT′] |
| 1780 | NM_000377.2(WAS): c.814T > C | 7454 | WAS | [′CGACCCAGATCTGCGGAGTCTGTTCYCCAGG |
| | (p.Ser272Pro) | | | GCAGGAATCAGCGAGGCCCA′] |
| 1781 | NM_000377.2(WAS): c.881T > C | 7454 | WAS | [′ACCTCTAAACTTATCTACGACTTCAYTGAGG |
| | (p.Ile294Thr) | | | ACCAGGGTGGGCTGGAGGCT′] |
| 1782 | m.12338T > C | 4540 | MT-ND5 | [′TTGGTGCAACTCCAAATAAAAGTAAYAACC |
| | | | | ATGCACACTACTATAACCACC′] |
| 1783 | m.5814T > C | 4511 | MT-TC | [′TCGAATTTGCAATTCAATATGAAAAYCACCT |
| | | | | CGGAGCTGGTAAAAAGAGGC′] |
| 1784 | m.12201T > C | 4564 | MT-TH | [′GACAACAGAGGCTTACGACCCCTTAYTTACC |
| | | | | GAGAAAGCTCACAAGAACTG′] |
| 1785 | NM_001165899.1(PDE4D): | 5144 | PDE4D | [′GGAGATGACTTGATTGTGACTCCATBTGCTC |
| | c.494T > C (p.Phe165Ser) | | | AGGTAAGCACAGCTTGGTGA′] |
| 1786 | NM_139125.3(MASP1): | 5648 | MASP1 | [′GTTACCCGTGGTGCCTCACGCTGAGYGCAA |
| | c.1888T > C (p.Cys630Arg) | | | AACTAGCTATGAGTCCCGCTC′] |
| 1787 | NM_007315.3(STAT1): c.520T > | 6772 | STAT1 | [′TTTACAAGATGAATATGACTTCAAAYGCAA |
| | C (p.Cys174Arg) | | | AACCTTGCAGAACAGAGGTAA′] |
| 1788 | NM_053025.3(MYLK): c.5275T > | −1 | — | [′TGCTGTGAGAGCCATTGGAAGACTGYCCTCT |
| | C (p.Ser1759Pro) | | | ATGGCAATGATCTCAGGGCT′] |
| 1789 | NM_001235.3(SERPINH1): | 871 | SERPINH1 | [′TCACCCGTGGTGGTGGCCTCGTCGCYAGGGC |
| | c.233T > C (p.Leu78Pro) | | | TCGTGTCGCTGGGCGGCAAG′] |
| 1790 | NM_005921.1(MAP3K1): | 4214 | MAP3K1 | [′GAGGAACGAATGATCAGGGAGAAACBGAA |
| | c.566T > C (p.Leu189Pro) | | | GGCAACCTGTATGCCAGCCTGG′] |
| 1791 | NM_005359.5(SMAD4): | 4089 | SMAD4 | [′GTTGATGACCTTCGTCGCTTATGCAYACTCA |
| | c.1499T > C (p.Ile500Thr) | | | GGATGAGTTTTGTGAAAGGC′] |
| 1792 | NM_000287.3(PEX6): c.1601T > | 5190 | PEX6 | [′CTGTTGCTCACAGCTGTGGACCTTCYGGGCC |
| | C (p.Leu534Pro) | | | GGGACCGTGATGGGCTGGGT′] |
| 1793 | NM_004153.3(ORC1): c.266T > C | 4998 | ORC1 | [′AAGAAACGTGCTCGAGTACAGTGGTYTGTC |
| | (p.Phe89Ser) | | | CGATTCTGTGAAGTCCCTGCC′] |
| 1794 | NM_006225.3(PLCD1): c.562T > | 5333 | PLCD1 | [′CTCGGCTGTCCTGGCTCTGCAGGAGYGTGAC |
| | C (p.Cys188Arg) | | | CACTCCCAGACAGACTCCCT′] |
| 1795 | NM_021252.4(RAB18): c.619T > | 22931 | RAB18 | [′CTGTGGTGGTTATTGCTCTGTGTTAYAAACT |
| | C (p.Ter207Gln) | | | CTGGGAAATTCCATCTCTTG′] |
| 1796 | NM_002242.4(KCNJ13): | −1 | — | [′TGGTGTAATGGAGTGATAGTACGTTDGTGG |
| | c.722T > C (p.Leu241Pro) | | | AAAGATGAAGAATGGACATTC′] |
| 1797 | NM_003072.3(SMARCA4): | 6597 | SMARCA4 | [′CTGCAGCGAGTGCTCTACCGCCACAYGCAG |
| | c.3032T > C (p.Met1011Thr) | | | GCCAAGGGCGTGCTGCTGACT′] |
| 1798 | NM_013339.3(ALG6): c.391T > C | 29929 | ALG6 | [′GAGATTTCTTTTAAGCAACAACAGTRCAAAA |
| | (p.Tyr131His) | | | CCACTGCAGGTATGTAAATC′] |
| 1799 | NM_019885.3(CYP26B1): | 56603 | CYP26B1 | [′TTGCCTCTCTGCCTTCCAGGTCTTCYCCAAG |
| | c.436T > C (p.Ser146Pro) | | | ATCTTCAGCCACGAGGCCCT′] |
| 1800 | NM_020433.4(JPH2): c.421T > C | 57158 | JPH2 | [′GTTCACCAACGGCATGCGCCATGGCYACGG |
| | (p.Tyr141His) | | | AGTACGCCAGAGCGTGCCCTA′] |
| 1801 | NM_000199.3(SGSH): c.892T > C | 6448 | SGSH | [′CCCCAGCGTTTTGGGTGCTCCGGGGRTGACA |
| | (p.Ser298Pro) | | | CCAGTAAGGGTTCAGCAGTG′] |
| 1802 | NM_173170.1(IL36RN): c.80T > | 26525 | IL36RN | [′CTTTATCTGCATAATAACCAGCTTCYAGCTG |
| | C (p.Leu27Pro) | | | GAGGGCTGCATGCAGGGAAG′] |
| 1803 | NM_016599.4(MYOZ2): c.142T > | 51778 | MYOZ2 | [′CAGAGACATCATGTTGGAAGAATTAYCCCA |
| | C (p.Ser48Pro) | | | TCTCAGTAACCGTGGTGCCAG′] |
| 1804 | NM_020191.2(MRPS22): | 56945 | MRPS22 | [′CCAATAATTTTCAAGGAAGAAAATCYTAGG |
| | c.644T > C (p.Leu215Pro) | | | GTAAGGTGACTTAGGTTTTAT′] |
| 1805 | NM_004278.3(PIGL): c.500T > C | 9487 | PIGL | [′TTGTCCTATCCCTCCTCCAGGGCCCYGCACT |
| | (p.Leu167Pro) | | | CAGAAGGGAAGTTACCTAAA′] |
| 1806 | NM_022445.3(TPK1): c.119T > C | 27010 | TPK1 | [′ATTTTGTTCTTTCTATTTGAAGCTCYTTTAAG |
| | (p.Leu40Pro) | | | AGCCTGTGCCGATGGAGGT′] |
| 1807 | NM_020634.1(GDF3): c.914T > C | 9573 | GDF3 | [′TGTCCCTTCTCACTGACCATCTCTCYCAACA |
| | (p.Leu305Pro) | | | GCTCCAATTATGCTTTCATG′] |
| 1808 | NM_017882.2(CLN6): c.200T > C | 54982 | CLN6 | [′CCCATTCTTCCATTTGCTCCGCAGCYGGTAT |
| | (p.Leu67Pro) | | | TCCCTCTCGAGTGGTTTCCA′] |
| 1809 | NM_024513.3(FYCO1): | 79443 | FYCO1 | [′TTTGTGAGGTCCAGCACCTACAGCCYGATCC |
| | c.4127T > C (p.Leu1376Pro) | | | CCATCACTGTGGCCGAGGCA′] |
| 1810 | NM_006147.3(IRF6): c.65T > C | 3664 | IRF6 | [′CTGGTGGCCCAGGTGGATAGTGGCCYCTAC |
| | (p.Leu22Pro) | | | CCTGGGCTCATCTGGCTACAC′] |
| 1811 | NM_025132.3(WDR19): | 57728 | WDR19 | [′GGAAATGTTGGCATAGTGATGTCCTYGGAA |
| | c.2129T > C (p.Leu710Ser) | | | CAAATAAAGGTAAACAGCATG′] |
| 1812 | NM_025132.3(WDR19): c.20T > | 57728 | WDR19 | [′TTTATTTTTTAGCGTATTTTCTCACYGCTAGA |
| | C (p.Leu7Pro) | | | AAAGACTTGGCTTGGCGCA′] |
| 1813 | NM_153026.2(PRICKLE1): | 144165 | PRICKLE1 | [′AAGTAAAAAATACCAGTCTGATATGYACTG |
| | c.1414T > C (p.Tyr472His) | | | GGCACAGTCACAAGATGGACT′] |
| 1814 | NM_014874.3(MFN2): | 9927 | MFN2 | [′GTAGTCCTCAAGGTTTATAAGAATGWGAGT |
| | c.1392 + 2T > C | | | CATGGAGCAACAGGTCCTCTT′] |
| 1815 | NM_014874.3(MFN2): c.647T > C | 9927 | MFN2 | [′GAGCTGGACAGCTGGATTGACAAGTYTTGT |
| | (p.Phe216Ser) | | | CTGGATGCTGATGTGTTTGTG′] |
| 1816 | NM_016097.4(IER3IP1): | 51124 | IER3IP1 | [′GTAAACTCAATTGCAATTGTGTTACYTTTAT |
| | c.233T > C (p.Leu78Pro) | | | TATTTGGATGAATATCAGTG′] |
| 1817 | NM_018718.2(CEP41): c.107T > | 95681 | CEP41 | [′TTCGAGCTTCTCAGTATATTTAGTCRTACTGT |
| | C (p.Met36Thr) | | | TACCTAAAAAGAAAATAAG′] |
| 1818 | NM_022489.3(INF2): c.310T > C | 64423 | INF2 | [′CCTGCTGCAGCTCACCTGCGTCAGCYGCGTG |
| | (p.Cys104Arg) | | | CGCGCCGTCATGAACTCGCG′] |
| 1819 | NM_022489.3(INF2): c.383T > C | 64423 | INF2 | [′AGCAACCAGGGCTACGTGCGCCAGCYCTCC |
| | (p.Leu128Pro) | | | CAGGGTGAGCCGCAGTGTGGG′] |
| 1820 | NM_018713.2(SLC30A10): | 55532 | SLC30A10 | [′GGCGCGCTGAGCAACGCGGTCTTCCYCACC |
| | c.266T > C (p.Leu89Pro) | | | GCGCTCTGCTTCACCATCTTC′] |
| 1821 | NM_058246.3(DNAJB6): | 10049 | DNAJB6 | [′CAGTCCATTTGAATTTGGCTTCACAYTCCGT |
| | c.277T > C (p.Phe93Leu) | | | AACCCAGATGATGTCTTCAG′] |
| 1822 | NM_024753.4(TTC21B): | 79809 | TTC21B | [′CAAAAGAATTATCTTTGCTATGACCYGGCTG |
| | c.2384T > C (p.Leu795Pro) | | | AGCTCTTATTAAAATTGAAA′] |
| 1823 | NM_032446.2(MEGF10): | 84466 | MEGF10 | [′TGACTGCGACCACATTTCTGGGCAGYGTACT |
| | c.2320T > C (p.Cys774Arg) | | | TGCCGCACTGGATTCATGGG′] |
| 1824 | NM_032446.2(MEGF10): | 84466 | MEGF10 | [′CGTTCTCTGTGCTGAGACCTGCCAGYGTGTC |
| | c.976T > C (p.Cys326Arg) | | | AACGGAGGGAAGTGTTACCA′] |
| 1825 | NM_024027.4(COLEC11): | 78989 | COLEC11 | [′GAAGCGCTACGCGGACGCCCAGCTGYCCTG |
| | c.505T > C (p.Ser169Pro) | | | CCAGGGCCGCGGGGGCACGCT′] |
| 1826 | NM_000035.3(ALDOB): | 229 | ALDOB | [′GCCCCAGAAGAACCCGTGTGAACATRCTGT |
| | c.1027T > C (p.Tyr343His) | | | CCTTTGGCCGCCTGGCAGTTA′] |
| 1827 | NM_012338.3(TSPAN12): | 23554 | TSPAN12 | [′CCTTCTATCATAATACAGAGCCCAGRGCAGA |
| | c.734T > C (p.Leu245Pro) | | | GTAATGGTGAGAATCATGGC′] |
| 1828 | NM_001159772.1(CANT1): | 124583 | CANT1 | [′CTCCTTGCCCAGGCCGCCCACGTACRGACGC |
| | c.671T > C (p.Leu224Pro) | | | TCGTCCTTCACTGCCAGCCA′] |
| 1829 | NM_001006657.1(WDR35): | 57539 | WDR35 | [′TGGCATGTACGTAGTAGGCATCCAGYGGAA |
| | c.781T > C (p.Trp261Arg) | | | CCACATGGGCAGCGTGTTAGC′] |
| 1830 | NM_000420.2(KEL): c.1790T > C | 3792 | KEL | [′TCAACAGTACTGCCTGGGGGCTGCCYCGCCT |
| | (p.Leu597Pro) | | | GTGACAACCATGCCCTCCAG′] |
| 1831 | NM_001243473.1(B9D1): | 27077 | B9D1 | [′AGGGCCCAGGTCAGAATGAGGACCTRCCGG |
| | c.400 + 2T > C | | | CCAGGTGAGAAGGGCACGTGC′] |
| 1832 | NM_015175.2(NBEAL2): | 23218 | NBEAL2 | [′ATTGCAGTCCATGTAGTCAGAGTGCYGACCT |
| | c.1163T > C (p.Leu388Pro) | | | GCATCATGAGTGACTCCCCC′] |
| 1833 | NM_000196.3(HSD11B2): | 3291 | HSD11B2 | [′GCTGGCAGCTCGGCCCCGCCGCCGCYATTAC |
| | c.1012T > C (p.Tyr338His) | | | CCCGGCCAGGGCCTGGGGCT′] |
| 1834 | NM_024599.5(RHBDF2): | 79651 | RHBDF2 | [′GCTTACCGCCCCCCTCCCTTCCAGAYTGTGG |
| | c.557T > C (p.Ile186Thr) | | | ATCCGCTGGCCCGGGGCCGG′] |
| 1835 | NM_001256714.1(DNAAF3): | 352909 | DNAAF3 | [′GGCTCTGTGGATGGACGGCACCTGCYGCGG |
| | c.386T > C (p.Leul29Pro) | | | ACCCTGTCCCGAGCGAAGTTC′] |
| 1836 | NM_020894.2(UVSSA): c.94T > C | 57654 | UVSSA | [′GAAAATGAAGGAACTGAAGAAAATTYGCAA |
| | (p.Cys32Arg) | | | GTATGTCTTAGGGTTCAGTAA′] |
| 1837 | NM_004453.3(ETFDH): | 2110 | ETFDH | [′TTGTTTCCTCAGTCTATACCAAAACYCACCT |
| | c.1130T > C (p.Leu377Pro) | | | TTCCTGGTGGTTTACTAATT′] |
| 1838 | NM_024306.4(FA2H): c.707T > C | 79152 | FA2H | [′CTCATCGAGTACCTCATCCACCGCTYCCTGT |
| | (p.Phe236Ser) | | | TCCACATGAAGCCCCCCAGC′] |
| 1839 | NM_001004127.2(ALG11): | −1 | — | [′AAAATAAACATTCCATTTGATGAATYAAAG |
| | c.1142T > C (p.Leu381Ser) | | | AATTATTTGTCTGAAGCAACA′] |
| 1840 | NM_021167.4(GATAD1): | 57798 | GATAD1 | [′TCGGCTCAGAAACACTAAATACAAAYCTGC |
| | c.304T > C (p.Ser102Pro) | | | TCCGGCTGCTGAAAAGAAAGT′] |
| 1841 | NM_016042.3(EXOSC3): | 51010 | EXOSC3 | [′AGTATTTGGAATGAATGGAAGAATAYGGGT |
| | c.712T > C (p.Trp238Arg) | | | TAAGGCAAAAACCATCCAGCA′] |
| 1842 | NM_001018005.1(TPM1): | 7168 | TPM1 | [′CAGGTGGCCCGTAAGCTGGTCATCAYTGAG |
| | c.515T > C (p.Ile172Thr) | | | AGCGACCTGGAACGTGCAGAG′] |
| 1843 | NM_001018005.1(TPM1): | 7168 | TPM1 | [′GAGCTGGACCACGCTCTCAACGATAYGACT |
| | c.842T > C (p.Met281Thr) | | | TCCATGTAAACGTTCATCCAC′] |
| 1844 | NM_033360.3(KRAS): c.211T > C | 3845 | KRAS | [′GGAGTACAGTGCAATGAGGGACCAGYACAT |
| | (p.Tyr71His) | | | GAGGACTGGGGAGGGCTTTCT′] |
| 1845 | NM_006218.2(PIK3CA): | 5290 | PIK3CA | [′TTTTTCTTTGTTTTTTAAGGAACACYGTCCAT |
| | c.1258T > C (p.Cys420Arg) | | | TGGCATGGGGAAATATAAA′] |
| 1846 | NM_006265.2(RAD21): | −1 | — | [′TGAATCTATCAGTTTGCTTGAGTTAYGTCGA |
| | c.1753T > C (p.Cys585Arg) | | | AATACGAACAGAAAACAAGC′] |
| 1847 | NM_000222.2(KIT): c.1859T > C | 3815 | KIT | [′ATTAAGTCAGATGCGGCCATGACTGYCGCT |
| | (p.Val620Ala) | | | GTAAAGATGCTCAAGCGTAAG′] |
| 1848 | NM_000076.2(CDKNIC): | 1028 | CDKNIC | [′CGCGCGCTGTCGCCCGCAGATTTCTYCGCCA |
| | c.827T > C (p.Phe276Ser) | | | AGCGCAAGAGATCAGCGCCT′] |
| 1849 | NM_005691.3(ABCC9): | 10060 | ABCC9 | [′AGACTATTGGCTGGCCACATGGACAYCGGA |
| | c.3058T > C (p.Ser1020Pro) | | | GTACAGTATAAACAATACTGG′] |
| 1850 | NM_012343.3(NNT): c.2930T > C | 23530 | NNT | [′ATGCCTGGTCAGCTTAATGTGCTGCYGGCTG |
| | (p.Leu977Pro) | | | AGGCTGGTGTGCCATATGAC′] |
| 1851 | NM_024110.4(CARD14): | 79092 | CARD14 | [′GTGCTGCTGCGGCGGTGCCAGCAGCYGCAG |
| | c.467T > C (p.Leu156Pro) | | | GAGCACCTGGGCCTGGCCGAG′] |
| 1852 | NM_000492.3(CFTR): c.1400T > | 1080 | CFTR | [′GATGGGTTTTATTTCCAGACTTCACYTCTAA |
| | C (p.Leu467Pro) | | | TGGTGATTATGGGAGAACTG′] |
| 1853 | NM_000518.4(HBB): c.2T > C | 3043 | HBB | [′CACTAGCAACCTCAAACAGACACCANGGTG |
| | (p.Met1Thr) | | | CATCTGACTCCTGAGGAGAAG′] |
| 1854 | NM_000518.4(HBB): c.*110T > C | 3043 | HBB | [′CCTTGAGCATCTGGATTCTGCCTAAHAAAAA |
| | | | | ACATTTATTTTCATTGCAAT′] |
| 1855 | NM_000518.4(HBB): | 3043 | HBB | [′AGTTGGTGGTGAGGCCCTGGGCAGGNTGGT |
| | c.92 + 2T > C | | | ATCAAGGTTACAAGACAGGTT′] |
| 1856 | NM_000206.2(IL2RG): c.455T > | 3561 | IL2RG | [′ACCACATATGCACACATATCTCCAGYGATCC |
| | C (p.Val152Ala) | | | CCTGGGCTCCAGAGAACCTA′] |
| 1857 | NM_000244.3(MEN1): c.518T > C | 4221 | MEN1 | [′GCTGTGGTTGGGGCCTGCCAGGCCCYGGGT |
| | (p.Leu173Pro) | | | CTCCGGGATGTCCACCTCGCC′] |
| 1858 | NM_000256.3(MYBPC3): | 4607 | MYBPC3 | [′CCGCCATCGTAGGCAGGCGGCTCCCVCTGTA |
| | c.2374T > C (p.Trp792Arg) | | | CTGTGCAGGAGTCCTCTCCC′] |
| 1859 | NM_002501.3(NFIX): c.179T > C | 4784 | NFIX | [′GAGGAGCGGGCGGTGAAGGACGAGCYGCTG |
| | (p.Leu60Pro) | | | GGCGAGAAGCCCGAGATCAAG′] |
| 1860 | NM_005022.3(PFN1): c.341T > C | 5216 | PFN1 | [′CCTCCTCCAGCGCTAGTCCTGCTGAYGGGCA |
| | (p.Met114Thr) | | | AAGAAGGTGTCCACGGTGGT′] |
| 1861 | NM_001172567.1(MYD88): | 4615 | MYD88 | [′CTTGCAGGTGCCCATCAGAAGCGACYGATC |
| | c.818T > C (p.Leu273Pro) | | | CCCATCAAGTACAAGGCAATG′] |
| 1862 | NM_001161581.1(POC1A): | 25886 | POCIA | [′GCCAGTGATGACAAGACTGTTAAGCYGTGG |
| | c.398T > C (p.Leu133Pro) | | | GACAAGAGCAGCCGGGAATGT′] |
| 1863 | NM_005270.4(GLI2): c.4663T > C | 2736 | GLI2 | [′CCCCCGAAACTCCTTGACCCTGCCCYCCATC |
| | (p.Ser1555Pro) | | | CCCGCAGGCATCAGCAACAT′] |
| 1864 | NM_152296.4(ATP1A3): | 478 | ATP1A3 | [′CTCCTCCGCCTAGGTCCCTGCCATCYCACTG |
| | c.2431T > C (p.Ser811Pro) | | | GCGTACGAGGCTGCCGAAAG′] |
| 1865 | NM_022787.3(NMNAT1): | 64802 | NMNAT1 | [′GAGAAACACTGCAGAAGCTAAGACAYAGGA |
| | c.838T > C (p.Ter280Gln) | | | ATTCTACAGCATGATATTTCA′] |
| 1866 | NM_005340.6(HINT1): c.250T > | 3094 | HINT1 | [′ACACTTAATGATTGTTGGCAAGAAAYGTGCT |
| | C (p.Cys84Arg) | | | GCTGATCTGGGCCTGAATAA′] |
| 1867 | NM_000155.3(GALT): c.416T > C | 2592 | GALT | [′TTCCACCCCTGGTCGGATGTAACGCYGCCAC |
| | (p.Leu139Pro) | | | TCATGTCGGTCCCTGAGATC′] |
| 1868 | NM_000155.3(GALT): c.386T > C | 2592 | GALT | [′CTCCCGTCACCACCCAGTAAGGTCAYGTGCT |
| | (p.Met129Thr) | | | TCCACCCCTGGTCGGATGTA′] |
| 1869 | NM_000155.3(GALT): c.680T > C | 2592 | GALT | [′ATGGAGTACAGCCGCCAGGAGCTACYCAGG |
| | (p.Leu227Pro) | | | AAGGTGGGAGAGAGCCAAGCC′] |
| 1870 | NM_007294.3(BRCA1): c.4986 + | 672 | BRCA1 | [′GCCTGACCCCAGAAGAATTTGTGAGBGTATC |
| | 6T > C | | | CATATGTATCTCCCTAATGA′] |
| 1871 | NM_007294.3(BRCA1): c.5074 + | 672 | BRCA1 | [′CTACTCATGTTGTTATGAAAACAGGYATACC |
| | 2T > C | | | AAGAACCTTTACAGAATACC′] |
| 1872 | NM_007294.3(BRCA1): | 672 | BRCA1 | [′GGTTTCTTTCAGCATGATTTTGAAGBCAGAG |
| | c.5207T > C (p. Val1736Ala) | | | GAGATGTGGTCAATGGAAGA′] |
| 1873 | NM_002437.4(MPV17): | 4358 | MPV17 | [′TGAAGCCCTGTTGAGGGGAGAACTTRCCAC |
| | c.186 + 2T > C | | | AAAGCCACAGCCCAGGGACAC′] |
| 1874 | NM_002769.4(PRSS1): c.116T > | −1 | — | [′GAGGAGAATTCTGTCCCCTACCAGGYGTCCC |
| | C (p.Val39Ala) | | | TGAATTCTGGCTACCACTTC′] |
| 1875 | NM_004211.3(SLC6A5): | 9152 | SLC6A5 | [′GATTTTCTTCTCTTTATCTGCTGCAYGGGGA |
| | c.1444T > C (p.Trp482Arg) | | | GGCCTGATCACTCTCTCTTC′] |
| 1876 | NM_005211.3(CSF1R): c.2297T > | 1436 | CSF1R | [′TTCTCCAGCCAAGTAGCCCAGGGCAYGGCC |
| | C (p.Met766Thr) | | | TTCCTCGCTTCCAAGAATGTG′] |
| 1877 | NM_005211.3(CSF1R): c.2546T > | 1436 | CSF1R | [′TATGGCATCCTCCTCTGGGAGATCTYCTCAC |
| | C (p.Phe849Ser) | | | TTGGTGAGCCACTGGGCCCA′] |
| 1878 | NM_005211.3(CSF1R): c.2603T > | 1436 | CSF1R | [′CTGGTGAACAGCAAGTTCTATAAACBGGTG |
| | C (p.Leu868Pro) | | | AAGGATGGATACCAAATGGCC′] |
| 1879 | NM_006796.2(AFG3L2): | 10939 | AFG3L2 | [′ATTTTTCAGATTGTTCAGTTTGGCABGAATG |
| | Tc.1997 > C (p.Met666Thr) | | | AAAAGGTTGGGCAAATCTCC′] |
| 1880 | NM_018713.2(SLC30A10): | 55532 | SLC30A10 | [′GTAAGTGGAAAGATTATTGCCACCCYGCAC |
| | c.1046T > C (p.Leu349Pro) | | | ATCAAGTATCCTAAGGACAGG′] |
| 1881 | NM_018713.2(SLC30A10): | 55532 | SLC30A10 | [′GCGGAGGGCTGTGTCCCCGGCGCTTYCGGG |
| | c.500T > C (p.Phe 167Ser) | | | GGGCCTCAGGGCGCGGAGGAC′] |
| 1882 | NM_000060.3(BTD): c.212T > C | 686 | BTD | [′TATGAGCATCCATCCATCCTGAGTCYGAACC |
| | (p.Leu71Pro) | | | CTCTGGCTCTCATCAGCCGC′] |
| 1883 | NM_000495.4(COL4A5): | 1287 | COL4A5 | [′TTTCCTGGTTTACAGGGTCCTCCAGYAAGTT |
| | c.438 + 2T > C | | | ATAAAATTTGGGATTATGAT′] |
| 1884 | NM_000282.3(PCCA): c.491T > C | 5095 | PCCA | [′CAGGCAGCAGAAGATGTCGTTTTCAYTGGA |
| | (p.Ile164Thr) | | | CCTGACACACATGCTATTCAA′] |
| 1885 | NM_000532.4(PCCB): c.1556T > | 5096 | PCCB | [′ACACGTGCCCGAATCTGCTGTGACCYGGAT |
| | C (p.Leu519Pro) | | | GTCTTGGCCAGCAAGAAGGTA′] |
| 1886 | NM_001099274.1(TINF2): | 26277 | TINF2 | [′CATAAGGAGCGCCCCACAGTCATGCYGTTTC |
| | c.860T > C (p.Leu287Pro) | | | CCTTTAGGAATCTCGGCTCA′] |
| 1887 | NM_001099274.1(TINF2): | 26277 | TINF2 | [′TAAGGAGCGCCCCACAGTCATGCTGYTTCCC |
| | c.862T > C (p.Phe288Leu) | | | TTTAGGAATCTCGGCTCACC′] |
| 1888 | NM_001363.4(DKC1): c.1049T > | 1736 | DKC1 | [′TCAATGCCTGTAGCTATTGCATTAAYGACCA |
| | C (p.Met350Thr) | | | CAGCGGTCATCTCTACCTGC′] |
| 1889 | NM_001363.4(DKC1): c.1193T > | 1736 | DKC1 | [′AAGCTGATGATCAAGCAGGGCCTTCYGGAC |
| | C (p.Leu398Pro) | | | AAGCATGGGAAGCCCACAGAC′] |
| 1890 | NM_004614.4(TK2): | 7084 | TK2 | [′CAGGAAAAAGAGAAAAAATCAGTGGYAAG |
| | c.156 + 2T > C | | | TCCCTCTTTTATGTGTACTCTC′] |
| 1891 | NM_004614.4(TK2): c.644T > C | 7084 | TK2 | [′GAATACCTGGAAGCAATTCACCATCYCCAT |
| | (p.Leu215Pro) | | | GAGGAGTGGCTCATCAAAGGC′] |
| 1892 | NM_024312.4(GNPTAB): | 79158 | GNPTAB | [′ATCGAAGGGCTGTCCCAGAAGTTTAYTTACC |
| | c.1208T > C (p.Ile403Thr) | | | TAAATGATGATGTCATGTTT′] |
| 1893 | NM_024312.4(GNPTAB): | 79158 | GNPTAB | [′TTTGCCTTCTCTTATTTTTATTATCYCATGAG |
| | c.3002T > C (p.Leu1001Pro) | | | TGCAGTGCAGCCACTGAAT′] |
| 1894 | NM_198253.2(TERT): c.3043T > | 7015 | TERT | [′CCGCCATCCTCTCAGGTTTCACGCAYGTGTG |
| | C (p.Cys1015Arg) | | | CTGCAGCTCCCATTTCATCA′] |
| 1895 | NM_207352.3(CYP4V2): | 285440 | CYP4V2 | [′TACAACTGCAGCTGCAATAAACTGGYCCTTA |
| | c.1021T > C (p.Ser341Pro) | | | TACCTGTTGGGTTCTAACCC′] |
| 1896 | NM_207352.3(CYP4V2): | 285440 | CYP4V2 | [′TGCTCAAAGTAATGATGATTCCGAGYATGTC |
| | c.655T > C (p.Tyr219His) | | | CGTGCAGTTTATAGGTAAAT′] |
| 1897 | NM_000335.4(SCN5A): | 6331 | SCN5A | [′GCCAAGCCCAACCAGATAAGCCTCAYCAAC |
| | c.5504T > C (p.Ile1835Thr) | | | ATGGACCTGCCCATGGTGAGT′] |
| 1898 | NM_001111.4(ADAR): c.2615T > | 103 | ADAR | [′CTCGGCCGCAAGATTCTGGCCGCCAYCATTA |
| | C (p.Ile872Thr) | | | TGAAAAAAGACTCTGAGGAC′] |
| 1899 | NM_004281.3(BAG3): c.1385T > | 9531 | BAG3 | [′ATCGAAGAGTATTTGACCAAAGAGCYGCTG |
| | C (p.Leu462Pro) | | | GCCCTGGATTCAGTGGACCCC′] |
| 1900 | NM_183075.2(CYP2U1): | 113612 | CYP2U1 | [′TTTTATGTCACGAGGCCTAGAAATCYGTCTG |
| | c.784T> C (p.Cys262Arg) | | | AACAGTCAAGTCCTCCTGGT′] |
| 1901 | NM_006177.3(NRL): c.287T > C | 4901 | NRL | [′TTGGGGCTGAGTCCTGAAGAGGCCAYGGAG |
| | (p.Met96Thr) | | | CTGCTGCAGGGTCAGGGCCCA′] |
| 1902 | NM_000344.3(SMN1): c.388T > C | 6606 | SMN1 | [′AACCTGTGTTGTGGTTTACACTGGAYATGGA |
| | (p.Tyr130His) | | | AATAGAGAGGAGCAAAATCT′] |
| 1903 | NM_152692.4(C1GALT1C1): | 29071 | C1GALT1C1 | [′AGGAGGAATTGTCTTAAGTGTAGAAYCAAT |
| | c.577T > C (p.Ser193Pro) | | | GAAAAGACTTAACAGCCTTCT′] |
| 1904 | NM_024531.4(SLC52A2): | 79581 | SLC52A2 | [′TTAGCACTGGCCTTTGTGCTGGCACYGGCAT |
| | Tc.368 > C (p.Leu123Pro) | | | GCTGTGCCTCGAATGTCACT′] |
| 1905 | NM_001253816.1(SLC52A2): | 79581 | SLC52A2 | [′GCTCACTGCAGGTCCTTGGCAGGGCYGGGC |
| | c.1016T > C (p.Leu339Pro) | | | GGCCTCTCTCTGCTGGGCGTG′] |
| 1906 | NM_002609.3(PDGFRB): | 5159 | PDGFRB | [′TCGGAGCTGAAGATCATGAGTCACCYTGGG |
| | c.1973T > C (p.Leu658Pro) | | | CCCCACCTGAACGTGGTCAAC′] |
| 1907 | NM_020822.2(KCNT1): | 57582 | KCNT1 | [′CAACAGCTATGAAGACGCCAAGGCCYACGG |
| | c.2386T > C (p.Tyr796His) | | | GTTCAAGAACAAGCTGATCAT′] |
| 1908 | NM_001369.2(DNAH5): | 1767 | DNAH5 | [′ACTATAGATCATTTTAATTGCATTTRTAAGT |
| | c.1121T > C (p.Ile374Thr) | | | GTAGGAATAGCATCCATCAT′] |
| 1909 | NM_017802.3(DNAAF5): | 54919 | DNAAF5 | [′GTCCAGTACCTGTACCGAGAGTTGCYGGTTC |
| | c.2384T > C (p.Leu795Pro) | | | ACCTTGACGATCCAGAGAGG′] |
| 1910 | NM_006383.3(CIB2): c.272T > C | 10518 | CIB2 | [′GAGGGGAACCTCACTTTCAACGACTYTGTG |
| | (p.Phe91Ser) | | | GACATGTTTTCCGTGCTCTGC′] |
| 1911 | NM_006383.3(CIB2): c.368T > C | 10518 | CIB2 | [′ACAGACTTCAACACTGACAACTTCAYCTGCA |
| | (p.Ile123Thr) | | | AGGAGGACCTGGAGCTGACG′] |
| 1912 | NM_005334.2(HCFC1): | 3054 | HCFC1 | [′TTAGTTGTTACTTCTTCACACAAGAYGGCGG |
| | c.−970T > C | | | CTCCCAGGGAGGAGGCATGA′] |
| 1913 | NM_178012.4(TUBB2B): | 347733 | TUBB2B | [′GGAGCCGAGCTGGTCGACTCGGTCCYGGAT |
| | c.350T > C (p.Leu117Pro) | | | GTGGTGAGGAAGGAGTCAGAG′] |
| 1914 | NM_000431.3(MVK): c.764T > C | 4598 | MVK | [′GTGGCTGGCGTCAGAAACAGGCTGCYCAAG |
| | (p.Leu255Pro) | | | GTGACTCTTGTTCCCTTCTTG′] |
| 1915 | NM_000431.3(MVK): c.122T > C | 4598 | MVK | [′TTGAACTTGAGAACATTCCTCCGGCYTCAAC |
| | (p.Leu41Pro) | | | CCCACAGCAATGGGAAAGTG′] |
| 1916 | NM_000431.3(MVK): | 4598 | MVK | [′GTGGCATCACACTCCTCAAGCCAGGYATCCC |
| | c.1039 + 2T > C | | | GGGGGTAGGTGGGCCAGGCT′] |
| 1917 | NM_000431.3(MVK): c.1094T > | 4598 | MVK | [′AAGCAGGCCCTGACCAGCTGTGGCTYTGAC |
| | C (p.Phe365Ser) | | | TGCTTGGAAACCAGCATCGGT′] |
| 1918 | NM_004055.4(CAPN5): c.731T > | 726 | CAPN5 | [′ACAGCAGCTGACATGGAGGCCCGCCYGGCG |
| | C (p.Leu244Pro) | | | TGCGGCCTGGTAAAGGGCCAC′] |
| 1919 | NM_133497.3(KCNV2): c.491T > | 169522 | KCNV2 | [′GCCGTCTTCCAGCTGGTCTACAATTYCTACC |
| | C (p.Phe164Ser) | | | TGTCCGGGGTGCTGCTGGTG′] |
| 1920 | NM_006567.3(FARS2): c.986T > | 10667 | FARS2 | [′ATGATCCTCTACGACATCCCTGATAYCCGTC |
| | C (p.Ile329Thr) | | | TCTTCTGGTGTGAGGACGAG′] |
| 1921 | NM_020376.3(PNPLA2): | 57104 | PNPLA2 | [′GCCTGCGCTTTCTGCAGCGGAACGGYGCGC |
| | c.757 + 2T > C | | | GGACCCGGGCGGGAGAGGGCG′] |
| 1922 | NM_018344.5(SLC29A3): | 55315 | SLC29A3 | [′TATGAGGAACTCCCAGGCACTGATAYCAGG |
| | c.607T > C (p.Ser203Pro) | | | TGAGAGCCAGGGTCCGGGCAG′] |
| 1923 | NM_012275.2(IL36RN): | 26525 | IL36RN | [′TGCAGGGAAGGTCATTAAAGGTTGGYGATG |
| | c.115 + 6T > C | | | AAACATGACCCACTTTCCTTG′] |
| 1924 | m.9191T > C | 4508 | MT-ATP6 | [′TTCACACTTCTAGTAAGCCTCTACCYGCACG |
| | | | | ACAACACATAATGACCCACC′] |
| 1925 | NM_000108.4(DLD): c.140T > C | 1738 | DLD | [′GTAGTTGATGCTGATGTAACAGTTAYAGGTT |
| | (p.Ile47Thr) | | | CTGGTCCTGGAGGATATGTT′] |
| 1926 | NM_000080.3(CHRNE): c.223T > | −1 | — | [′AGAGGAGACTCTCACCACTAGCGTCYGGAT |
| | C (p.Trp75Arg) | | | TGGAATCGTGAGTCAAATCTG′] |
| 1927 | NM_004376.5(COX15): | 1355 | COX15 | [′TGCCATTACAGTGCTCTACTTCCTCBCTCGG |
| | c.1030T > C (p.Ser344Pro) | | | AGAATTCCCCTTCCTAGAAG′] |
| 1928 | NM_004333.4(BRAF): c.1403T > | 673 | BRAF | [′GGACAAAGAATTGGATCTGGATCATYTGGA |
| | C (p.Phe468Ser) | | | ACAGTCTACAAGGGAAAGTGG′] |
| 1929 | NM_004333.4(BRAF): c.1454T > | 673 | BRAF | [′TTAGGTGATGTGGCAGTGAAAATGTYGAAT |
| | C (p.Leu485Ser) | | | GTGACAGCACCTACACCTCAG′] |
| 1930 | NM_005188.3(CBL): c.1201T > C | 867 | CBL | [′GATTGAGCCCTGTGGACACCTCATGYGCAC |
| | (p.Cys401Arg) | | | ATCCTGTCTTACATCCTGGCA′] |
| 1931 | NM_002834.3(PTPN11): c.211T > | 5781 | PTPN11 | [′CTATGACCTGTATGGAGGGGAGAAABTTGC |
| | C (p.Phe71Leu) | | | CACTTTGGCTGAGTTGGTCCA′] |
| 1932 | NM_002834.3(PTPN11): c.853T > | 5781 | PTPN11 | [′AAATAGATATAAAAACATCCTGCCCBGTAA |
| | C (p.Phe285Leu) | | | GTATCAATATTCCGCTCAGTA′] |
| 1933 | NM_002880.3(RAF1): c.769T > C | 5894 | RAF1 | [′AGGTTCCCTCTCCCAGAGGCAGAGGYCGAC |
| | (p.Ser257Pro) | | | ATCCACACCTAATGTCCACAT′] |
| 1934 | NM_002880.3(RAF1): c.1423T > | 5894 | RAF1 | [′AGTCCTTAACAAGCATTGAGATATAYTTCTC |
| | C (p.Phe475Leu) | | | CATGAAGGCTTAACAGTGAA′] |
| 1935 | NM_005633.3(SOS1): c.806T > C | 6654 | SOS1 | [′GGCCATATAGAAGATACAGTAGAAABGACA |
| | (p.Met269Thr) | | | GATGAAGGCAGTCCCCATCCA′] |
| 1936 | NM_005633.3(SOS1): c.1649T > | 6654 | SOS1 | [′ATATCTTTACAGTACCGGAGTACACYGGAA |
| | C (p.Leu550Pro) | | | AGGATGCTTGATGTAACAATG′] |
| 1937 | NM_005633.3(SOS1): c.2104T > | 6654 | SOS1 | [′TCGGCACTGGGTAGAGCACCACTTCYATGAT |
| | C (p.Tyr702His) | | | TTTGAAAGAGATGCATATCT′] |
| 1938 | NM_002755.3(MAP2K1): | 5604 | MAP2K1 | [′CAACTCTCCGTACATCGTGGGCTTCYATGGT |
| | c.388T > C (p.Tyr130His) | | | GCGTTCTACAGCGATGGCGA′] |
| 1939 | NC_012920.1: m.7505T > C | 4574 | MT-TS1 | [′TTTCAAGCCAACCCCATGGCCTCCAYGACTT |
| | | | | TTTCAAAAAGGTATTAGAAA′] |
| 1940 | NM_000084.4(CLCN5): c.674T > | 1184 | CLCN5 | [′GTGGCTTGCTGCTGTGGGAACATCCYGTGCC |
| | C (p.Leu225Pro) | | | ACTGCTTCAACAAATACAGG′] |
| 1941 | NM_000530.6(MPZ): c.89T > C | 4359 | MPZ | [′GCAGTGCTGTCCCCGGCCCAGGCCAYCGTG |
| | (p.Ile30Thr) | | | GTTTACACCGACAGGGAGGTC′] |
| 1942 | NM_000530.6(MPZ): c.244T > C | 4359 | MPZ | [′CCCTCATTCCTCATAGATCTTCCACYATGCC |
| | (p.Tyr82His) | | | AAGGGACAACCCTACATTGA′] |
| 1943 | NM_000530.6(MPZ): c.266T > C | 4359 | MPZ | [′CACTATGCCAAGGGACAACCCTACAHTGAC |
| | (p.Ile89Thr) | | | GAGGTGGGGACCTTCAAAGAG′] |
| 1944 | NM_000748.2(CHRNB2): | 1141 | CHRNB2 | [′TACCTCATGTTCACCATGGTGCTTGYCACCT |
| | c.923T > C (p.Val308Ala) | | | TCTCCATCGTCACCAGCGTG′] |
| 1945 | NM_003611.2(OFD1): | 8481 | OFD1 | [′CGGGGTATACTGGATACACTCAAGGYATCG |
| | c.111 + 2T > C | | | GATTTAGGCGTATCTGTGTCA′] |
| 1946 | NM_003611.2(OFD1): c.274T > C | 8481 | OFD1 | [′AAGATGTGGCTATGAATATTCACTTYCTGTT |
| | (p.Ser92Pro) | | | TTCTTTCCAGAAAGTGGTTT′] |
| 1947 | NM_024408.3(NOTCH2): | 4853 | NOTCH2 | [′GCCCCACCCTGTGACAGGTCTCCTGYGTCAT |
| | c.1117T > C (p.Cys373Arg) | | | CTGGATGATGCATGCATCAG′] |
| 1948 | NM_024408.3(NOTCH2): | 4853 | NOTCH2 | [′TCTGGATAAGATTGGAGGCTTCACAYGTCTG |
| | c.1438T > C (p.Cys480Arg) | | | TGCATGCCAGGTAAATGGGC′] |
| 1949 | NM_000540.2(RYR1): c.9242T > | 6261 | RYR1 | [′CCCCGCTGCCCTTCTAGGACAGTGAYGAAGT |
| | C (p.Met3081Thr) | | | CAGGCCCTGAGATCGTGAAG′] |
| 1950 | NM_000096.3(CP): c.650T > C | 1356 | CP | [′AAAGAAAAACATATTGACCGAGAATYTGTG |
| | (p.Phe217Ser) | | | GTGATGTTTTCTGTGGTGGAT′] |
| 1951 | NM_000096.3(CP): c.548T > C | 1356 | CP | [′GTGACTAGGATTTACCATTCCCACABTGATG |
| | (p.Ile183Thr) | | | CTCCAAAAGATATTGCCTCA′] |
| 1952 | NM_000540.2(RYR1): c.1205T > | 6261 | RYR1 | [′CAGGAGGAGTCCCAGGCCGCCCGCAYGATC |
| | C (p.Met402Thr) | | | CACAGCACCAATGGCCTATAC′] |
| 1953 | NM_006517.4(SLC16A2): | 6567 | SLC16A2 | [′TTCGGGGGCCTTATCGTCGTCTGTCYTTTCCT |
| | c.1253T > C (p.Leu418Pro) | | | GGGCCTTTGCGATGGCTTC′] |
| 1954 | NM_000096.3(CP): c.1123T > C | 1356 | CP | [′CCGTGGGAAGCATGTTAGACACTACYACAT |
| | (p.Tyr375His) | | | TGCCGCTGAGGAAATCATCTG′] |
| 1955 | NM_002739.3(PRKCG): c.391T > | 5582 | PRKCG | [′CGGGCTTGTGCACCAGGGCATGAAAHGCTC |
| | C (p.Cys131Arg) | | | CTGTGAGTGACCTGGGCCTTG′] |
| 1956 | NM_000116.4(TAZ): c.310T > C | 6901 | TAZ | [′GACCCCTGCAGCTGCAGACATCTGCYTCACC |
| | (p.Phe104Leu) | | | AAGGAGCTACACTCCCACTT′] |
| 1957 | NM_000138.4(FBN1): c.2341T > | 2200 | FBN1 | [′CAGTCTCCTTTGTGACAATGGACAAYGTAGA |
| | C (p.Cys781Arg) | | | AATACTCCTGGAAGTTTTGT′] |
| 1958 | NM_000138.4(FBN1): c.4222T > | 2200 | FBN1 | [′CTTTCTGGCTGTAGACCTTGATGAGYGCTCT |
| | C (p.Cys1408Arg) | | | GAGAACCTGAATCTCTGTGG′] |
| 1959 | NM_000256.3(MYBPC3): | 4607 | MYBPC3 | [′GTAGCACGGAGCTCTTTGTGAAAGGYGGGC |
| | c.1351 + 2T > C | | | CTGGGACCTGAGGATGTGGGA′] |
| 1960 | NM_000256.3(MYBPC3): | 4607 | MYBPC3 | [′GACGCGGAAGTAGTAGCCATTGCCARTGAT |
| | c.3392T > C (p.Ile1131Thr) | | | GAGCTCTGGCACCACGCAGTG′] |
| 1961 | NM_000256.3(MYBPC3): | 4607 | MYBPC3 | [′CCTCCTATCAGCCTTCCGCCGCACGYGAGTG |
| | c.821 + 2T > C | | | GCCATCCTCAGGGCCTGGGG′] |
| 1962 | NM_000257.3(MYH7): c.1370T > | 4625 | MYH7 | [′ACCAAGCAGCCACGCCAGTACTTCAYAGGA |
| | C (p.Ile457Thr) | | | GTCCTGGACATCGCTGGCTTC′] |
| 1963 | NM_000257.3(MYH7): c.2093T > | 4625 | MYH7 | [′ATGCACCAGCTGCGCTGCAATGGTGYGCTG |
| | C (p. Val698Ala) | | | GAGGGCATCCGCATCTGCAGG′] |
| 1964 | NM_000257.3(MYH7): c.2546T > | 4625 | MYH7 | [′AAGAGTGCAGAAAGAGAGAAGGAGAYGGC |
| | C (p.Met849Thr) | | | CTCCATGAAGGAGGAGTTCACA′] |
| 1965 | NM_000257.3(MYH7): c.2555T > | 4625 | MYH7 | [′GAAAGAGAGAAGGAGATGGCCTCCAHGAA |
| | C (p.Met852Thr) | | | GGAGGAGTTCACACGCCTCAAA′] |
| 1966 | NM_000257.3(MYH7): c.602T > | 4625 | MYH7 | [′CAGTACTTTGCTGTTATTGCAGCCAYTGGGG |
| | C (p.Ile201Thr) | | | ACCGCAGCAAGAAGGACCAG′] |
| 1967 | NM_000257.3(MYH7): c.788T > | 4625 | MYH7 | [′ACAGGAAAGTTGGCATCTGCAGACAYAGAG |
| | C (p.Ile263Thr) | | | ACCTGTGAGTGCCATGAATCT′] |
| 1968 | NM_000260.3(MYO7A): | 4647 | MYO7A | [′CTCCTGCCCCACGTGCAGCGCTTCCYGCAGT |
| | c.5573T > C (p.Leu1858Pro) | | | CCCGAAAGCACTGCCCACTC′] |
| 1969 | NM_000441.1(SLC26A4): | 5172 | SLC26A4 | [′GGAGAGCCTGGCCAAGTGCTGCAGGYAGCG |
| | c.164 + 2T > C | | | GCCGCGCGGGCCTGCGTAGAG′] |
| 1970 | NM_000441.1(SLC26A4): c.2T > | −1 | — | [′TCGCTGTCCTCTGGCTCGCAGGTCABGGCAG |
| | C (p.Met1Thr) | | | CGCCAGGCGGCAGGTCGGAG′] |
| 1971 | NM_000441.1(SLC26A4) | 5172 | SLC26A4 | [′AATGGAGTTCTCTCTATTATCTATGYAAGTG |
| | c.765 + 2T > C | | | TTGCTTCTTGCTCCAGGGAT′] |
| 1972 | NM_000551.3(VHL): c.497T > C | 7428 | VHL | [′CTGAAAGAGCGATGCCTCCAGGTTGYCCGG |
| | (p.Val166Ala) | | | AGCCTAGTCAAGCCTGAGAAT′] |
| 1973 | NM_001399.4(EDA): c.2T > C | 1896 | EDA | [′AGAGAGTGGGTGTCTCCGGAGGCCAYGGGC |
| | (p.Met1Thr) | | | TACCCGGAGGTGGAGCGCAGG′] |
| 1974 | NM_001943.3(DSG2): | 1829 | DSG2 | [′CTGTTGAAGAGTTGAGTGCAGCACGYAAGA |
| | c.523 + 2T > C | | | GTCTTTTTTTTTTTTTTTAAT′] |
| 1975 | NM_004572.3(PKP2): c.2062T > | 5318 | PKP2 | [′TTGCGGACACTTTTGGCGATCAAGGRCAGAT |
| | C (p.Ser688Pro) | | | ACATCCTTATAACAATGGAA′] |
| 1976 | NM_005633.3(SOS1): c.1310T > | 6654 | SOS1 | [′ATTGATGGTTGGGAGGGAAAAGACABTGGA |
| | C (p.Ile437Thr) | | | CAGTGTTGTAATGAATTTATA′] |
| 1977 | NM_170707.3(LMNA): c.799T > | 4000 | LMNA | [′GTATAAGAAGGAGCTGGAGAAGACTYATTC |
| | C (p.Tyr267His) | | | TGCCAAGGTGCTTGCTCTCGA′] |
| 1978 | NM_206933.2(USH2A): | 7399 | USH2A | [′TCTTGAAGATACAATTGTCTTAAACYGGAGA |
| | c.10561T > C (p.Trp3521Arg) | | | AAACCTATACAATCAAATGG′] |
| 1979 | NM_206933.2(USH2A): | 7399 | USH2A | [′CGACACAACAAGCCAGCCATATAGAYGCCT |
| | c.1606T > C (p.Cys536Arg) | | | CTGCTCCCAGGAGAGCTTCAC′] |
| 1980 | NM_206933.2(USH2A): | −1 | — | [′GTCGAGGACGTACAACAGGAGCAGGYAAAT |
| | c.5857 + 2T > C | | | ACTTATCTTCAAATGCATATG′] |
| 1981 | NM_000492.3(CFTR): c.1090T > | 1080 | CFTR | [′CTGGGCTGTACAAACATGGTATGACYCTCTT |
| | C (p.Ser364Pro) | | | GGAGCAATAAACAAAATACA′] |
| 1982 | NM_000548.3(TSC2): c.5150T > | 7249 | TSC2 | [′CCCTTCGTGGCCCGCCAGATGGCCCYGCACG |
| | C (p.Leu1717Pro) | | | CAAATGTGAGTGGGGGTGGG′] |
| 1983 | NM_000548.3(TSC2): c.2410T > | 7249 | TSC2 | [′CCTCATCCACCGCTGTGCCAGCCAGYGCGTC |
| | C (p.Cys804Arg) | | | GTGGCCTTGTCCATCTGCAG′] |
| 1984 | NM_000548.3(TSC2): c.3106T > | 7249 | TSC2 | [′GGACATGATGGCTCGATACGTCTTCYCCAAC |
| | C (p.Ser1036Pro) | | | TTCACGGCTGTCCCGAAGAG′] |
| 1985 | NM_000212.2(ITGB3): c.2231T > | −1 | — | [′GCCGCCCTGCTCATCTGGAAACTCCYCATCA |
| | C (p.Leu744Pro) | | | CCATCCACGACCGAAAAGAA′] |
| 1986 | NM_183415.2(UBE3B): | 89910 | UBE3B | [′AGATGATCTGGGATGGAATTGTAGGYAAGA |
| | c.1741 + 2T > C | | | GAAAAGGTGTCTGCTGTTGTT′] |
| 1987 | NM_005120.2(MED12): | 9968 | MED12 | [′CCTTTTAGCTTGTAGTGAACAGGACYCTGAG |
| | c.3493T > C (p.Ser1165Pro) | | | CCAGGGGCCCGGCTTACCTG′] |
| 1988 | NM_001033053.2(NLRP1): | 22861 | NLRP1 | [′CTAGCCCTCCATACCTGGGAGCAGAYGGGG |
| | c.230T > C (p.Met77Thr) | | | CTGAGGTCACTGTGCGCCCAA′] |
| 1989 | NM_025152.2(NUBPL): | 80224 | NUBPL | [′ATGCCTATATGAACTTTTCTGGTTCYAATGG |
| | c.815 − 27T > C | | | ATGTCTGCTGGGCTCTTTTA′] |
| 1990 | NM_001288953.1(TTC7A): | 57217 | TTC7A | [′GCGTGGCAGGGCCTGGGCGAGGTGCYGCAG |
| | c.2366T > C (p.Leu789Pro) | | | GCCCAGGGCCAGAACGAGGCT′] |
| 1991 | NM_014845.5(FIG4): c.524T > C | 9896 | FIG4 | [′TACAGCTATGATTTGTCCCACTCACYTCAAT |
| | (p.Leu175Pro) | | | ATAATCTCACTGTCTTGCGA′] |
| 1992 | NM_000059.3(BRCA2): c.2T > C | 675 | BRCA2 | [′ATTGGAGGAATATCGTAGGTAAAAABGCCT |
| | (p.Met1Thr) | | | ATTGGATCCAAAGAGAGGCCA′] |
| 1993 | NM_000059.3(BRCA2): c.316 + 2 | 675 | BRCA2 | [′TAGATAAATTCAAATTAGACTTAGGYAAGT |
| | T > C | | | AATGCAATATGGTAGACTGGG′] |
| 1994 | NM_000059.3(BRCA2): c.67 + 2T | 675 | BRCA2 | [′TTAAGACACGCTGCAACAAAGCAGGHATTG |
| | > C | | | ACAAATTTTATATAACTTTAT′] |
| 1995 | NM_000059.3(BRCA2): | 675 | BRCA2 | [′AGATGCCTAAGCCCAGAAAGGGTGCYTCTT |
| | c.7958T > C (p.Leu2653Pro) | | | CAACTAAAATACAGGCAAGTT′] |
| 1996 | NM_000218.2(KCNQ1): | 3784 | KCNQ1 | [′TGCTTCTCTGTCTTTGCCATCTCCTHCTTTGC |
| | c.1016T > C (p.Phe339Ser) | | | GCTCCCAGCGGTAGGTGCC′] |
| | NM_000218.2(KCNQ1): | 3784 | KCNQ1 | [] |
| | c.1045T > C (p.Ser349Pro) | | | |
| | NM_000218.2(KCNQ1): | 3784 | KCNQ1 | [] |
| | c.1052T > C (p.Phe351Ser) | | | |
| | NM_000218.2(KCNQ1): | 3784 | KCNQ1 | [] |
| | c.1058T> C (p.Leu353Pro) | | | |
| | NM_000218.2(KCNQ1): | 3784 | KCNQ1 | [] |
| | c.1541T > C (p.Ile514Thr) | | | |
| | NM_000218.2(KCNQ1): | 3784 | KCNQ1 | [] |
| | c.1661T > C (p.Val554Ala) | | | |
| 1997 | NM_000218.2(KCNQ1): | 3784 | KCNQ1 | [′CTTCTCTCCAGGCTGGACCAGTCCABTGGGA |
| | c.1700T > C (p.Ile567Thr) | | | AGCCCTCACTGTTCATCTCC′] |
| | NM_000218.2(KCNQ1): c.2T > C | 3784 | KCNQ1 | [] |
| | (p.Met1Thr) | | | |
| | NM_000218.2(KCNQ1): c.341T > | 3784 | KCNQ1 | [] |
| | C (p.Leul14Pro) | | | |
| 1998 | NM_000218.2(KCNQ1): c.560T > | 3784 | KCNQ1 | [′GGCTGCCGCAGCAAGTACGTGGGCCYCTGG |
| | C (p.Leu187Pro) | | | GGGCGGCTGCGCTTTGCCCGG′] |
| | NM_000218.2(KCNQ1): c.572T > | 3784 | KCNQ1 | [] |
| | C (p.Leu191Pro) | | | |
| | NM_000218.2(KCNQ1): c.716T > | 3784 | KCNQ1 | [] |
| | C (p.Leu239Pro) | | | |
| | NM_000218.2(KCNQ1): c.752T > | 3784 | KCNQ1 | [] |
| | C (p.Leu251Pro) | | | |
| | NM_000218.2(KCNQ1): c.797T > | 3784 | KCNQ1 | [] |
| | C (p.Leu266Pro) | | | |
| | NM_000218.2(KCNQ1): c.824T > | 3784 | KCNQ1 | [] |
| | C (p.Phe275Ser) | | | |
| | NM_000218.2(KCNQ1): c.910T > | 3784 | KCNQ1 | [] |
| | C (p.Trp304Arg) | | | |
| | NM_000218.2(KCNQ1): c.913T > | 3784 | KCNQ1 | [] |
| | C (p.Trp305Arg) | | | |
| 1999 | NM_000492.3(CFTR): c.1021T > | 1080 | CFTR | [′CCTCCGGAAAATATTCACCACCATCYCATTC |
| | C (p.Ser341Pro) | | | TGCATTGTTCTGCGCATGGC′] |
| 2000 | NM_000492.3(CFTR): c.1853T > | 1080 | CFTR | [′TTAAAGAAAGCTGACAAAATATTAAYTTTG |
| | C (p.Ile618Thr) | | | CATGAAGGTAGCAGCTATTTT′] |
| 2001 | NM_000492.3(CFTR): c.2780T > | 1080 | CFTR | [′TACGTGGGAGTAGCCGACACTTTGCYTGCTA |
| | C (p.Leu927Pro) | | | TGGGATTCTTCAGAGGTCTA′] |
| 2002 | NM_000492.3(CFTR): c.3230T > | 1080 | CFTR | [′GGACGGCAGCCTTACTTTGAAACTCYGTTCC |
| | C (p.Leu1077Pro) | | | ACAAAGCTCTGAATTTACAT′] |
| 2003 | NM_007294.3(BRCA1): c.115T > | 672 | BRCA1 | [′GATCAAGGAACCTGTCTCCACAAAGNGTGA |
| | C (p.Cys39Arg) | | | CCACATATTTTGCAAGTAAGT′] |
| 2004 | NM_007294.3(BRCA1): c.190T > | 672 | BRCA1 | [′GAAAGGGCCTTCACAGTGTCCTTTABGTAAG |
| | C (p.Cys64Arg) | | | AATGATATAACCAAAAGGTA′] |
| 2005 | NM_007294.3(BRCA1): | 672 | BRCA1 | [′ATGTAAGAATGATATAACCAAAAGGYATAT |
| | c.212 + 2T > C | | | AATTTGGTAATGATGCTAGGT′] |
| 2006 | NM_007294.3(BRCA1): c.2T > C | 672 | BRCA1 | [′TAAAGTTCATTGGAACAGAAAGAAABGGAT |
| | (p.Met1Thr) | | | TTATCTGCTCTTCGCGTTGAA′] |
| 2007 | NM_007294.3(BRCA1): | 672 | BRCA1 | [′CAGAACAAAGCACATCAGAAAAAGGBGTGT |
| | c.4357 + 2T > C | | | ATTGTTGGCCAAACACTGATA′] |
| 2008 | NM_007294.3(BRCA1): | 672 | BRCA1 | [′CTCTTCTTCCAGATCTTCAGGGGGCYAGAAA |
| | c.5291T > C (p.Leu1764Pro) | | | TCTGTTGCTATGGGCCCTTC′] |
| 2009 | NM_007294.3(BRCA1): c.65T > C | 672 | BRCA1 | [′GTCATTAATGCTATGCAGAAAATCTYAGAGT |
| | (p.Leu22Ser) | | | GTCCCATCTGGTAAGTCAGC′] |
| 2010 | NM_005236.2(ERCC4): c.689T > | 2072 | ERCC4 | [′ATGCTTGCTATACAGACTGCTATACYGGACA |
| | C (p.Leu230Pro) | | | TTTTAAATGCATGTCTAAAG′] |
| 2011 | NM_005236.2(ERCC4): c.706T > | 2072 | ERCC4 | [′TGCTATACTGGACATTTTAAATGCAYGTCTA |
| | C (p.Cys236Arg) | | | AAGGAACTAAAATGCCATAA′] |
| 2012 | NM_000435.2(NOTCH3): | 4854 | NOTCH3 | [′GGCGTGCTGGTGCTCACAGTGCTGCYGCCGC |
| | c.4556T > C (p.Leu1519Pro) | | | CAGAGGAGCTACTGCGTTCC′] |
| 2013 | NM_153704.5(TMEM67): | 91147 | TMEM67 | [′GGAAATTTTCTCAAGTGGCAAACTTYAGAA |
| | c.1046T > C (p.Leu349Ser) | | | GGAGGTGTTTTACAGGTAAGC′] |
| 2014 | NM_001142519.1(FAM111A): | 63901 | FAM111A | [′GTCTAAAAAAGCAGAAAGTCCAGAGYATGT |
| | c.1531T > C (p.Tyr511His) | | | CCATATGTATACTCAAAGAAG′] |
| 2015 | NM_014795.3(ZEB2): c.3211T > | 9839 | ZEB2 | [′GCGCTTCTCACACTCGGGCTCGTACYCGCAG |
| | C (p.Ser1071Pro) | | | CACATGAATCACAGGTATTC′] |
| 2016 | NM_001199107.1(TBC1D24): | 57465 | TBC1D24 | [′CCCCTCTGCTACTTCGCCCGGGTCTYTGACG |
| | c.686T > C (p.Phe229Ser) | | | TCTTCCTGGTGGAGGGCTAC′] |
| 2017 | NM_022114.3(PRDM16): | 63976 | PRDM16 | [′GTGGGAGCCCTGAAGGAGAAGTACCYGCGG |
| | c.2660T > C (p.Leu887Pro) | | | CCGTCCCCGCTGCTCTTCCAC′] |
| 2018 | NM_001130089.1(KARS): | 3735 | KARS | [′AGCTTCTGGGGGAAAGCTCATCTTCYATGAT |
| | c.517T > C (p.Tyr173His) | | | CTTCGAGGAGAGGGGGTGAA′] |
| 2019 | NM_005689.2(ABCB6): | 10058 | ABCB6 | [′CTCATCTTCTCCCACCTGCACGAGCYCTCAC |
| | c.1067T > C (p.Leu356Pro) | | | TGCGCTGGCACCTGGGGCGC′] |
| 2020 | NM_001070.4(TUBG1): | 7283 | TUBG1 | [′CCCCTGTTTTCTGCACACCCCAAGCYCTTCG |
| | c.1160T > C (p.Leu387Pro) | | | AGAGAACCTGTCGCCAGTAT′] |
| 2021 | NM_001283009.1(RTEL1): | −1 | — | [′CGGGCCCCTCTCAGCAGGCTGTGTGYGCCA |
| | c.3730T > C (p.Cys1244Arg) | | | GGGCTGTGGGGCAGAGGACGT′] |
| 2022 | NM_001135021.1(ELMOD3): | 84173 | ELMOD3 | [′ATCACCCACATTGCCATCCAGGCCTYGAGA |
| | c.794T > C (p.Leu265Ser) | | | GAGGAGTGTCTCTCCAGGTGA′] |
| 2023 | NM_001382.3(DPAGT1): | 1798 | DPAGT1 | [′CTACCATCTCTCCCCGCAGGAATCCYGTACT |
| | c.503T> C (p.Leu168Pro) | | | ATGTCTACATGGGGCTGCTG′] |
| 2024 | m.10237T > C | 4537 | MT-ND3 | [′CCATAAAATTCTTCTTAGTAGCTATYACCTT |
| | | | | CTTATTATTTGATCTAGAAA′] |
| 2025 | m.11253T > C | 4538 | MT-ND4 | [′TCCCTTCCCCTACTCATCGCACTAAYTTACA |
| | | | | CTCACAACACCCTAGGCTCA′] |
| 2026 | m.12811T > C | 4540 | MT-ND5 | [′ATCCTTCTTGCTCATCAGTTGATGAYACGCC |
| | | | | CGAGCAGATGCCAACACAGC′] |
| 2027 | m.14325T > C | 4541 | MT-ND6 | [′ATTCAGCTTCCTACACTATTAAAGTYTACCA |
| | | | | CAACCACCACCCCATCATAC′] |
| 2028 | NM_000142.4(FGFR3): | 2261 | FGFR3 | [′ACCCAGCAGTGGGGGCTCGCGGACGNGAAG |
| | c.2419T > C (p.Ter807Arg) | | | GGCCACTGGTCCCCAACAATG′] |
| 2029 | NM_000370.3(TTPA): c.548T > C | 7274 | TTPA | [′GTAGCCAAGAAGATTGCTGCTGTACYTACG |
| | (p.Leu183Pro) | | | GTAAATGTATATTTTAACTGT′] |
| 2030 | NM_000375.2(UROS): c.139T > C | 7390 | UROS | [′TGAGTTTTTGTCTCTTCCCAGTTTCYCTGAGA |
| | (p.Ser47Pro) | | | AGGTAAGGCCTGTTGTGAC′] |
| 2031 | NM_001006657.1(WDR35): | 57539 | WDR35 | [′TCTGGCACCATTCAGAGATACAGTCYACCTA |
| | c.1592T > C (p.Leu531Pro) | | | ATGTTGGTTTGATTCAAAAA′] |
| 2032 | NM_001876.3(CPT1A): | 1374 | CPT1A | [′GCAGATGCGCCGATCGTGGCCCACCYTTGG |
| | c.1451T > C (p.Leu484Pro) | | | GAGGTGAGTTTTCACACTTTT′] |
| 2033 | NM_004595.4(SMS): c.449T > C | 6611 | SMS | [′GACGAAGATTCACCTTATCAAAATAYAAAA |
| | (p.Ile150Thr) | | | ATTCTACACTCGAAGCAGTTT′] |
| 2034 | NM_005211.3(CSF1R): c.2483T > | 1436 | CSF1R | [′AAGTGGATGGCCCCAGAGAGCATCTYTGAC |
| | C (p.Phe828Ser) | | | TGTGTCTACACGGTTCAGAGC′] |
| 2035 | NM_170707.3(LMNA): c.644T > | 4000 | LMNA | [′TCCTTCCTCCAACCCTTCCAGGAGCYGCGTG |
| | C (p.Leu215Pro) | | | AGACCAAGCGCCGTCATGAG′] |
| 2036 | NM_194248.2(OTOF): c.3413T > | 9381 | OTOF | [′CCACCCTCCAACCTCTCCCAGGTGCYGTTCT |
| | C (p.Leu1138Pro) | | | GGGGCCTACGGGACCTAAAG′] |
| 2037 | NM_000540.2(RYR1): c.14762 | 6261 | RYR1 | [′TACAGGGTGGTCTTCGACATCACCTYCTTCT |
| | > C (p.Phe4921Ser) | | | TCTTCGTCATCGTCATCCTG′] |
| 2038 | NM_000540.2(RYR1): c.7358T > | 6261 | RYR1 | [′GCCGGCAAGGGTGAGGCCCTGCGGAYCCGC |
| | C (p.Ile2453Thr) | | | GCCATCCTCCGCTCCCTTGTG′] |
| 2039 | NM_000540.2(RYR1): | 6261 | RYR1 | [′GAAGTGTCAGCCGTGCTCTACTACCYGGACC |
| | c.10817T> C (p.Leu3606Pro) | | | AGGTGGGTGGGGCCGGAGGG′] |
| 2040 | NM_000540.2(RYR1): | 6261 | RYR1 | [′TTTTACACCCTGCGGTTCCTTGCCCYCTTCTT |
| | c.13703T > C (p.Leu4568Pro) | | | GGCATTTGCCATCAACTTC′] |
| 2041 | NM_000540.2(RYR1): | 6261 | RYR1 | [′CCCGCCCTGCGGTGTCTGAGCCTCCYGCATA |
| | c. 13949T > C (p.Leu4650Pro) | | | CACTGGTGGCCTTTCTCTGC′] |
| 2042 | NM_000540.2(RYR1): | 6261 | RYR1 | [′GTGTGCCCACAGTCCTTCCTGTACCYGGGCT |
| | c.14378T > C (p.Leu4793Pro) | | | GGTATATGGTGATGTCCCTC′] |
| 2043 | NM_015896.3(ZMYND10): | 51364 | ZMYND10 | [′CTCAGGGCTTAGCAGCAGGTTGTACRGGGC |
| | 7c.79T > C (p.Leu266Pro) | | | GATCCACACTTGCCCGTCCAA′] |
| 2044 | NM_018127.6(ELAC2): c.460T > | 60528 | ELAC2 | [′AAAATACCTCGAAGCAATCAAAATAYTTTCT |
| | C (p.Phe154Leu) | | | GGTCCATTGAAAGGAATAGA′] |
| 2045 | NM_199355.2(ADAMTS18): | 170692 | ADAMTS18 | [′CCTGCGGGTCACCATCCTCACGTACYGTACA |
| | c.605T > C (p.Leu202Pro) | | | AAAGGACAGCAGAGGAGAAG′] |
| 2046 | NM_023110.2(FGFR1): c.494T > | 2260 | FGFR1 | [′TCCCCAGAAAAGATGGAAAAGAAATYGCAT |
| | C (p.Leu165Ser) | | | GCAGTGCCGGCTGCCAAGACA′] |
| 2047 | NM_001059.2(TACR3): c.766T > | 6870 | TACR3 | [′CCATATTATCGTCATTATACTGGTGYACTGT |
| | C (p.Tyr256His) | | | TTCCCATTGCTCATCATGGG′] |
| 2048 | NM_002055.4(GFAP): c.1070T > | 2670 | GFAP | [′TACCAGGACCTGCTCAATGTCAAGCHGGCC |
| | C (p.Leu357Pro) | | | CTGGACATCGAGATCGCCACC′] |
| 2049 | NM_002055.4(GFAP): c.1076T > | 2670 | GFAP | [′GACCTGCTCAATGTCAAGCTGGCCCYGGAC |
| | C (p.Leu359Pro) | | | ATCGAGATCGCCACCTACAGG′] |
| 2050 | NM_002055.4(GFAP): c. 1096T > | 2670 | GFAP | [′GGCCCTGGACATCGAGATCGCCACCYACAG |
| | C (p.Tyr366His) | | | GAAGCTGCTAGAGGGCGAGGA′] |
| 2051 | NM_002055.4(GFAP): c.221T > C | 2670 | GFAP | [′CGGGCCAGTGAGCGGGCAGAGATGAYGGAG |
| | (p.Met74Thr) | | | CTCAATGACCGCTTTGCCAGC′] |
| 2052 | NM_002055.4(GFAP): c.247T > C | 2670 | GFAP | [′GGAGCTCAATGACCGCTTTGCCAGCYACATC |
| | (p.Tyr83His) | | | GAGAAGGTTCGCTTCCTGGA′] |
| 2053 | NM_002055.4(GFAP): c.269T > C | 2670 | GFAP | [′AGCTACATCGAGAAGGTTCGCTTCCYGGAA |
| | (p.Leu90Pro) | | | CAGCAAAACAAGGCGCTGGCT′] |
| 2054 | NM_002055.4(GFAP): c.290T > C | 2670 | GFAP | [′TTCCTGGAACAGCAAAACAAGGCGCYGGCT |
| | (p.Leu97Pro) | | | GCTGAGCTGAACCAGCTGCGG′] |
| 2055 | NM_002055.4(GFAP): c.302T > C | 2670 | GFAP | [′CAAAACAAGGCGCTGGCTGCTGAGCYGAAC |
| | (p.Leu101Pro) | | | CAGCTGCGGGCCAAGGAGCCC′] |
| 2056 | NM_002055.4(GFAP): c.704T > C | 2670 | GFAP | [′GCCAAGCCAGACCTCACCGCAGCCCYGAAA |
| | (p.Leu235Pro) | | | GAGATCCGCACGCAGTATGAG′] |
| 2057 | NM_002055.4(GFAP): c.739T > C | 2670 | GFAP | [′CCGCACGCAGTATGAGGCAATGGCGYCCAG |
| | (p.Ser247Pro) | | | CAACATGCATGAAGCCGAAGA′] |
| 2058 | NM_002055.4(GFAP): c.992T > C | 2670 | GFAP | [′AGTTATCAGGAGGCGCTGGCGCGGCYGGAG |
| | (p.Leu331Pro) | | | GAAGAGGGGCAGAGCCTCAAG′] |
| 2059 | NM_005554.3(KRT6A): | 3853 | KRT6A | [′GAGATCGCCACCTACCGCAAGCTGCBGGAG |
| | c.1406T > C (p.Leu469Pro) | | | GGTGAGGAGTGCAGGTGGGTA′] |
| 2060 | NM_005554.3(KRT6A): c.521T > | 3853 | KRT6A | [′CAGATCAAGACCCTCAACAACAAGTBTGCC |
| | C (p.Phe174Ser) | | | TCCTTCATCGACAAGGTGAGC′] |
| 2061 | NM_153490.2(KRT13): c.332T > | 3860 | KRT13 | [′AATGAGAAGATCACCATGCAGAACCYCAAC |
| | C (p.Leu111Pro) | | | GACCGCCTGGCTTCCTACCTG′] |
| 2062 | NM_170707.3(LMNA): c.1619T > | 4000 | LMNA | [′CCATGTCCCCACCAGGAAGTGGCCAYGCGC |
| | C (p.Met540Thr) | | | AAGCTGGTGCGCTCAGTGACT′] |
| | NM_000218.2(KCNQ1): | 3784 | KCNQ1 | [] |
| | c.1117T > C (p.Ser373Pro) | | | |
| 2063 | NM_000218.2(KCNQ1): | 3784 | KCNQ1 | [′TCCCCCTGCCCGACCTCAGACCGCABGGAG |
| | c.1135T > C (p.Trp379Arg) | | | GTGCTATGCTGCCGAGAACCC′] |
| | NM_000218.2(KCNQ1): | 3784 | KCNQ1 | [] |
| | c.1165T> C (p.Ser389Pro) | | | |
| | NM_000218.2(KCNQ1): | 3784 | KCNQ1 | [] |
| | c.1174T > C (p.Trp392Arg) | | | |
| | NM_000218.2(KCNQ1): | 3784 | KCNQ1 | [] |
| | c.1550T > C (p.Ile517Thr) | | | |
| | NM_000218.2(KCNQ1): | 3784 | KCNQ1 | [] |
| | c.1696T > C (p.Ser566Pro) | | | |
| | NM_000218.2(KCNQ1): | −1 | — | [] |
| | c.1805T > C (p.Leu602Pro) | | | |
| | NM_000218.2(KCNQ1): c.401T > | 3784 | KCNQ1 | [] |
| | C (p.Leu134Pro) | | | |
| 2064 | NM_000218.2(KCNQ1): c.550T > | 3784 | KCNQ1 | [′CTGGTCCGCCGGCTGCCGCAGCAAGBACGT |
| | C (p.Tyr184His) | | | GGGCCTCTGGGGGCGGCTGCG′] |
| | NM_000218.2(KCNQ1): c.608T > | 3784 | KCNQ1 | [] |
| | C (p.Leu203Pro) | | | |
| | NM_000218.2(KCNQ1): c.625T > | 3784 | KCNQ1 | [] |
| | C (p.Ser209Pro) | | | |
| | NM_000218.2(KCNQ1): c.742T > | 3784 | KCNQ1 | [] |
| | C (p.Trp248Arg) | | | |
| 2065 | NM_000218.2(KCNQ1): c.749T > | 3784 | KCNQ1 | [′GACCGCCAGGGAGGCACCTGGAGGCHCCTG |
| | C (p.Leu250Pro) | | | GGCTCCGTGGTCTTCATCCAC′] |
| | NM_000218.2(KCNQ1): c.829T > | 3784 | KCNQ1 | [] |
| | C (p.Ser277Pro) | | | |
| | NM_000218.2(KCNQ1): c.832T > | 3784 | KCNQ1 | [] |
| | C (p.Tyr278His) | | | |
| | NM_000218.2(KCNQ1): c.845T > | 3784 | KCNQ1 | [] |
| | C (p.Leu282Pro) | | | |
| | NM_000218.2(KCNQ1): c.908T > | 3784 | KCNQ1 | [] |
| | C (p.Leu303Pro) | | | |
| 2066 | NM_000238.3(KCNH2): c.122T > | 3757 | KCNH2 | [′AACGCTCGGGTGGAGAACTGCGCCGBCATC |
| | C (p. Val41Ala) | | | TACTGCAACGACGGCTTCTGC′] |
| | NM_000238.3(KCNH2): | 3757 | KCNH2 | [] |
| | c.1238T > C (p.Leu413Pro) | | | |
| | NM_000238.3(KCNH2): | 3757 | KCNH2 | [] |
| | c.1279T > C (p.Tyr427His) | | | |
| | NM_000238.3(KCNH2): | 3757 | KCNH2 | [] |
| | c.1387T > C (p.Phe463Leu) | | | |
| | NM_000238.3(KCNH2): c.160T > | 3757 | KCNH2 | [] |
| | C (p.Tyr54His) | | | |
| 2067 | NM_000238.3(KCNH2): | 3757 | KCNH2 | [′GAGTACGGCGCGGCCGTGCTGTTCTYGCTCA |
| | c.1655T > C (p.Leu552Ser) | | | TGTGCACCTTTGCGCTCATC′] |
| | NM_000238.3(KCNH2): | 3757 | KCNH2 | [] |
| | c.1691T > C (p.Leu564Pro) | | | |
| | NM_000238.3(KCNH2): | 3757 | KCNH2 | [] |
| | c.1700T > C (p.Ile567Thr) | | | |
| | NM_000238.3(KCNH2): | 3757 | KCNH2 | [] |
| | c.1702T > C (p.Trp568Arg) | | | |
| | NM_000238.3(KCNH2): | 3757 | KCNH2 | [] |
| | c.1705T > C (p.Tyr569His) | | | |
| | NM_000238.3(KCNH2): | 3757 | KCNH2 | [] |
| | c.1736T > C (p.Met579Thr) | | | |
| 2068 | NM_000238.3(KCNH2): | 3757 | KCNH2 | [′TGGCTGCACAACCTGGGCGACCAGANAGGC |
| | c.1778T > C (p.Ile593Thr) | | | AAACCCTACAACAGCAGCGGC′] |
| | NM_000238.3(KCNH2): | 3757 | KCNH2 | [] |
| | c.1816T > C (p.Ser606Pro) | | | |
| 2069 | NM_000238.3(KCNH2): | 3757 | KCNH2 | [′CTTCAGCAGCCTCACCAGTGTGGGCHTCGGC |
| | c.1879T > C (p.Phe627Leu) | | | AACGTCTCTCCCAACACCAA′] |
| | NM_000238.3(KCNH2): | 3757 | KCNH2 | [] |
| | c.1889T > C (p.Val630Ala) | | | |
| | NM_000238.3(KCNH2): | 3757 | KCNH2 | [] |
| | c.1945T > C (p.Ser649Pro) | | | |
| | NM_000238.3(KCNH2): | 3757 | KCNH2 | [] |
| | c.1985T > C (p.Ile662Thr) | | | |
| | NM_000238.3(KCNH2): c.202T > | 3757 | KCNH2 | [] |
| | C (p.Phe68Leu) | | | |
| | NM_000238.3(KCNH2): | 3757 | KCNH2 | [] |
| | c.2033T > C (p.Leu678Pro) | | | |
| | NM_000238.3(KCNH2): c.206T > | 3757 | KCNH2 | [] |
| | C (p.Leu69Pro) | | | |
| | NM_000238.3(KCNH2): | 3757 | KCNH2 | [] |
| | c.2078T > C (p.Leu693Pro) | | | |
| | NM_000238.3(KCNH2): | 3757 | KCNH2 | [] |
| | c.2309T > C (p.Val770Ala) | | | |
| 2070 | NM_000238.3(KCNH2): | 3757 | KCNH2 | [′TGGCCTCCAGGGAAGAATGACATCTBTGGG |
| | c.2414T > C (p.Phe805Ser) | | | GAGCCTCTGAACCTGTATGCA′] |
| | NM_000238.3(KCNH2): | 3757 | KCNH2 | [] |
| | c.2452T > C (p.Ser818Pro) | | | |
| | NM_000238.3(KCNH2): | 3757 | KCNH2 | [] |
| | c.2573T > C (p.Ile858Thr) | | | |
| 2071 | NM_000238.3(KCNH2): c.257T > | 3757 | KCNH2 | [′GCTGCCGCGCAGATCGCGCAGGCACBGCTG |
| | C (p.Leu86Pro) | | | GGCGCCGAGGAGCGCAAAGTG′] |
| | NM_000238.3(KCNH2): c.260T > | 3757 | KCNH2 | [] |
| | C (p.Leu87Pro) | | | |
| | NM_000238.3(KCNH2): c.287T > | 3757 | KCNH2 | [] |
| | C (p.Ile96Thr) | | | |
| | NM_000238.3(KCNH2): | 3757 | KCNH2 | [] |
| | c.3146T > C (p.Leu1049Pro) | | | |
| | NM_000238.3(KCNH2): c.322T > | 3757 | KCNH2 | [] |
| | C (p.Cys108Arg) | | | |
| 2072 | NM_000238.3(KCNH2): c.371T > | 3757 | KCNH2 | [′AAGAACGAGGATGGGGCTGTCATCABGTTC |
| | C (p.Met124Thr) | | | ATCCTCAATTTCGAGGTGGTG′] |
| | NM_000238.3(KCNH2): c.65T > | 3757 | KCNH2 | [] |
| | C (p.Phe22Ser) | | | |
| | NM_000238.3(KCNH2): c.86T > | 3757 | KCNH2 | [] |
| | C (p.Phe29Ser) | | | |
| | NM_000238.3(KCNH2): c.872T > | 3757 | KCNH2 | [] |
| | C (p.Met291Thr) | | | |
| | NM_000238.3(KCNH2): c.89T > | 3757 | KCNH2 | [] |
| | C (p.Ile30Thr) | | | |
| 2073 | NM_000238.3(KCNH2): c.92T > | 3757 | KCNH2 | [′GCCCCCCTAGGCCGTAAGTTCATCABCGCCA |
| | C (p.Ile31Thr) | | | ACGCTCGGGTGGAGAACTGC′] |
| | NM_000891.2(KCNJ2): c.301T > | 3759 | KCNJ2 | [] |
| | C (p.Cys101Arg) | | | |
| | NM_000891.2(KCNJ2): c.650T > | 3759 | KCNJ2 | [] |
| | C (p.Leu217Pro) | | | |
| | NM_000335.4(SCN5A): | 6331 | SCN5A | [] |
| | c.1187T > C (p. Val396Ala) | | | |
| | NM_000335.4(SCN5A): | 6331 | SCN5A | [] |
| | c.1190T > C (p.Ile397Thr) | | | |
| | NM_000335.4(SCN5A): | 6331 | SCN5A | [] |
| | c.2018T > C (p.Leu673Pro) | | | |
| | NM_000335.4(SCN5A): | 6331 | SCN5A | [] |
| | c.2516T > C (p.Leu839Pro) | | | |
| | NM_000335.4(SCN5A): | 6331 | SCN5A | [] |
| | c.2551T > C (p.Phe851Leu) | | | |
| | NM_000335.4(SCN5A): | 6331 | SCN5A | [] |
| | c.2743T > C (p.Cys915Arg) | | | |
| | NM_000335.4(SCN5A): | 6331 | SCN5A | [] |
| | c.2783T > C (p.Leu928Pro) | | | |
| | NM_000335.4(SCN5A): c.278T > | 6331 | SCN5A | [] |
| | C (p.Phe93Ser) | | | |
| | NM_000335.4(SCN5A): | 6331 | SCN5A | [] |
| | c.2804T > C (p.Leu935Pro) | | | |
| 2074 | NM_000335.4(SCN5A): | 6331 | SCN5A | [′CAAGCGGACCACCTGGGATTTCTGCYGTGGT |
| | c.2944T > C (p.Cys982Arg) | | | CTCCTGCGGCAGCGGCCTCA′] |
| 2075 | NM_198056.2(SCN5A): | 6331 | SCN5A | [′TGCCGCCCAGGGCCAGCTGCCCAGCYGCAT |
| | c.3010T > C (p.Cys1004Arg) | | | TGCCACCCCCTACTCCCCGCC′] |
| 2076 | NM_000335.4(SCN5A): | 6331 | SCN5A | [′TTGTCTGCAGGCCTTCGAGGACATCYACCTA |
| | c.3679T > C (p.Tyr1227His) | | | GAGGAGCGGAAGACCATCAA′] |
| | NM_000335.4(SCN5A): | 6331 | SCN5A | [] |
| | c.3713T > C (p.Leu1238Pro) | | | |
| 2077 | NM_000335.4(SCN5A): | 6331 | SCN5A | [′TGCCGACAAGATGTTCACATATGTCYTCGTG |
| | c.3745T > C (p.Phe1249Leu) | | | CTGGAGATGCTGCTCAAGTG′] |
| | NM_000335.4(SCN5A): | 6331 | SCN5A | [] |
| | c.3929T > C (p.Leu1310Pro) | | | |
| | NM_000335.4(SCN5A): | 6331 | SCN5A | [] |
| | c.4027T > C (p.Phe1343Leu) | | | |
| | NM_000335.4(SCN5A): | 6331 | SCN5A | [] |
| | c.4028T > C (p.Phe1343Ser) | | | |
| | NM_000335.4(SCN5A): | 6331 | SCN5A | [] |
| | c.4034T > C (p.Leu1345Pro) | | | |
| | NM_000335.4(SCN5A): | 6331 | SCN5A | [] |
| | c.4046T > C (p.Ile1349Thr) | | | |
| | NM_000335.4(SCN5A): c.407T > | 6331 | SCN5A | [] |
| | C (p.Leul36Pro) | | | |
| | NM_000335.4(SCN5A): | 6331 | SCN5A | [] |
| | c.4340T > C (p.Ile1447Thr) | | | |
| 2078 | NM_000335.4(SCN5A): | 6331 | SCN5A | [′TTTATTGGTGTCATCATTGACAACTBCAACC |
| | c.4415T > C (p.Phe1472Ser) | | | AACAGAAGAAAAAGATACGT′] |
| | NM_000335.4(SCN5A): | 6331 | SCN5A | [] |
| | c.4453T> C (p.Phe1485Leu) | | | |
| | NM_198056.2(SCN5A): | 6331 | SCN5A | [] |
| | c.4493T > C (p.Met1498Thr) | | | |
| | NM_000335.4(SCN5A): | 6331 | SCN5A | [] |
| | c.4742T> C (p.Leu1581Pro) | | | |
| | NM_000335.4(SCN5A): | 6331 | SCN5A | [] |
| | c.4778T > C (p.Phe1593Ser) | | | |
| 2079 | NM_000335.4(SCN5A): | 6331 | SCN5A | [′CGCACGCTGCTCTTTGCCCTCATGABGTCCC |
| | c.4952T > C (p.Met1651Thr) | | | TGCCTGCCCTCTTCAACATC′] |
| | NM_000335.4(SCN5A): | 6331 | SCN5A | [] |
| | c.5111T > C (p.Phe1704Ser) | | | |
| | NM_000335.4(SCN5A): | 6331 | SCN5A | [] |
| | c.5179T > C (p.Cys1727Arg) | | | |
| | NM_000335.4(SCN5A): c.544T > | 6331 | SCN5A | [] |
| | C (p.Cys182Arg) | | | |
| 2080 | NM_000335.4(SCN5A): c.5471T | 6331 | SCN5A | [′TTTGCCGATGCCCTGTCTGAGCCACYCCGTA |
| | > C (p.Leu1824Pro) | | | TCGCCAAGCCCAACCAGATA′] |
| 2081 | NM_198056.2(SCN5A): | 6331 | SCN5A | [′GAGATGGACGCCCTGAAGATCCAGAHGGAG |
| | c.5624T > C (p.Met1875Thr) | | | GAGAAGTTCATGGCAGCCAAC′] |
| 2082 | NM_000335.4(SCN5A): c.635T > | 6331 | SCN5A | [′AGATACACAACTGAATTTGTGGACCHGGGC |
| | C (p.Leu212Pro) | | | AATGTCTCAGCCTTACGCACC′] |
| | NM_000335.4(SCN5A): c.689T > | 6331 | SCN5A | [] |
| | C (p.Ile230Thr) | | | |
| | NM_198056.2(SCN5A): c.944T > | 6331 | SCN5A | [] |
| | C (p.Leu315Pro) | | | |
| 2083 | NM_177976.2(ARL6): c.272T > C | 84100 | ARL6 | [′TTACACAGAGAAGGCCAAGCTATTAYTTTTG |
| | (p.Ile91Thr) | | | TCATTGATAGTAGTGATAGA′] |
| 2084 | NM_000487.5(ARSA): c.899T > C | 410 | ARSA | [′TCCCGAGGCGGCTGCTCCGGTCTCTYGCGGT |
| | (p.Leu300Ser) | | | GTGGAAAGGGAACGACCTAC′] |
| 2085 | NM_000267.3(NF1): c.1595T > C | 4763 | NF1 | [′GAATTAATTACAGGGCTCGTCCAACYGGTCC |
| | (p.Leu532Pro) | | | CTCAGTCACACATGCCAGAG′] |
| 2086 | NM_001042492.2(NF1): | 4763 | NF1 | [′CTTCAGAAAAGAGTGATGGCACTGCBGAGG |
| | c.2288T > C (p.Leu763Pro) | | | CGCATTGAGCATCCCACTGCA′] |
| 2087 | NM_004990.3(MARS): c.1108T > | 4141 | MARS | [′CCTCACCAGAATCACCCAGGACATTYTCCAG |
| | C (p.Phe370Leu) | | | CAGTTGCTGAAACGAGGTTT′] |
| 2088 | NM_004990.3(MARS): c.1568T > | 4141 | MARS | [′TTCTATGTCTGGTTTGATGCCACTAYTGGCT |
| | C (p.Ile523Thr) | | | ATCTGTCCATCACAGCCAAC′] |
| 2089 | NM_006920.4(SCN1A): | −1 | — | [′GTTCATTGTGCTATTTACTGGAGAGYGTGTA |
| | c.4729T > C (p.Cys1577Arg) | | | CTGAAACTCATCTCTCTACG′] |
| 2090 | NM_006920.4(SCN1A): | −1 | — | [′TGAGACCTTTGGCAACAGCATGATCYGCCTA |
| | c.5113T > C (p.Cys1705Arg) | | | TTCCAAATTACAACCTCTGC′] |
| 2091 | NM_006920.4(SCN1A): c.838T > | 6323 | SCN1A | [′CAACCTGAGGAATAAATGTATACAAYGGCC |
| | C (p.Trp280Arg) | | | TCCCACCAATGCTTCCTTGGA′] |
| 2092 | NM_006920.4(SCN1A): c.269T > | 6323 | SCN1A | [′TGTTGTGTTCCTGTCTTACAGACTTYTATAGT |
| | C (p.Phe90Ser) | | | ATTGAATAAAGGGAAGGCC′] |
| 2093 | NM_006920.4(SCN1A): c.272T > | 6323 | SCN1A | [′TGTGTTCCTGTCTTACAGACTTTTAYAGTATT |
| | C (p.Ile91Thr) | | | GAATAAAGGGAAGGCCATC′] |
| 2094 | NM_006920.4(SCN1A): | −1 | — | [′TATTTCACCAATGCCTGGTGTTGGCYGGACT |
| | c.3827T > C (p.Leu1276Pro) | | | TCTTAATTGTTGATGTAGGT′] |
| 2095 | NM_006920.4(SCN1A): | −1 | — | [′CCAAACAAACTCCAGCTCATTGCCAYGGATT |
| | c.5522T > C (p.Met1841Thr) | | | TGCCCATGGTGAGTGGTGAC′] |
| 2096 | NM_006920.4(SCN1A): c.568T > | 6323 | SCN1A | [′AGATTTTACTTTCCTTCGGGATCCAYGGAAC |
| | C (p.Trp190Arg) | | | TGGCTCGATTTCACTGTCAT′] |
| 2097 | NM_002608.2(PDGFB): c.356T > | 5155 | PDGFB | [′ATAGACCGCACCAACGCCAACTTCCYGGTG |
| | C (p.Leu119Pro) | | | TGGCCGCCCTGTGTGGAGGTG′] |
| 2098 | NM_000833.4(GRIN2A): c.2T > C | 2903 | GRIN2A | [′TTGCAGGGACCGTCAGTGGCGACTAYGGGC |
| | (p.Met1Thr) | | | AGAGTGGGCTATTGGACCCTG′] |
| 2099 | NM_002474.2(MYH11): | 4629 | MYH11 | [′CTCCCCATCGCTGCACTTGGACTGCDGCTCC |
| | c.3791T > C (p.Leu1264Pro) | | | TGCACCTGCGCCTCCAGCTT′] |
| 2100 | NM_014139.2(SCN11A): | 11280 | SCN11A | [′CTCAACCTCTTCATTGCCTTACTGCYCAATT |
| | c.2432T > C (p.Leu811Pro) | | | CCTTTAGCAATGAGGAAAGA′] |
| 2101 | NM_006514.3(SCN10A): | 6336 | SCN10A | [′GGAGTCAGGGTTGCTGGGTTGAGGARGAGG |
| | c.1661T > C (p.Leu554Pro) | | | GCTTCTAGGGAGGGGGCCTTG′] |
| 2102 | NM_000179.2(MSH6): c.1346T > | 2956 | MSH6 | [′CTTATTGGAGTCAGTGAACTGGGGCYGGTAT |
| | C (p.Leu449Pro) | | | TCATGAAAGGCAACTGGGCC′] |
| 2103 | NM_000179.2(MSH6): | 2956 | MSH6 | [′GAATCAGTCACTACGATTATTTCGGYAACTA |
| | c.4001 + 2T > C | | | ACTAACTATAATGGAATTAT′] |
| 2104 | NM_000249.3(MLH1): c.1745T > | 4292 | MLH1 | [′GCTTCTTCCTAGGAGCCAGCACCGCYCTTTG |
| | C (p.Leu582Pro) | | | ACCTTGCCATGCTTGCCTTA′] |
| 2105 | NM_000249.3(MLH1): c.2246T > | 4292 | MLH1 | [′CTGCAGCTTGCTAACCTGCCTGATCHATACA |
| | C (p.Leu749Pro) | | | AAGTCTTTGAGAGGTGTTAA′] |
| 2106 | NM_000249.3(MLH1): c.229T > C | 4292 | MLH1 | [′ACAGAAAGAAGATCTGGATATTGTAYGTGA |
| | (p.Cys77Arg) | | | AAGGTTCACTACTAGTAAACT′] |
| 2107 | NM_000249.3(MLH1): | 4292 | MLH1 | [′GGCAATCAAGGGACCCAGATCACGGYAAGA |
| | c.453 + 2T > C | | | ATGGTACATGGGAGAGTAAAT′] |
| 2108 | NM_000249.3(MLH1): c.739T > C | 4292 | MLH1 | [′AGCCTTCAAAATGAATGGTTACATABCCAAT |
| | (p.Ser247Pro) | | | GCAAACTACTCAGTGAAGAA′] |
| 2109 | NM_000249.3(MLH1): | 4292 | MLH1 | [′GCATCTTCTTACTCTTCATCAACCGHAAGTT |
| | c.790 + 2T > C | | | AAAAAGAACCACATGGGAAA′] |
| 2110 | NM_000251.2(MSH2): c.1319T > | 4436 | MSH2 | [′TTGTTGGCAGTTTTTGTGACTCCTCYTACTG |
| | C (p.Leu440Pro) | | | ATCTTCGTTCTGACTTCTCC′] |
| 2111 | NM_000251.2(MSH2): | 4436 | MSH2 | [′AACAGATGTTCCACATCATTACTGGYAAAA |
| | c.2005 + 2T > C | | | AACCTGGTTTTTGGGCTTTGT′] |
| 2112 | NM_000251.2(MSH2): c.2089T > | 4436 | MSH2 | [′GGCCCAAATTGGGTGTTTTGTGCCAYGTGAG |
| | C (p.Cys697Arg) | | | TCAGCAGAAGTGTCCATTGT′] |
| 2113 | NM_000251.2(MSH2): c.560T > C | 4436 | MSH2 | [′CCTGATAATGATCAGTTCTCCAATCBTGAGG |
| | (p.Leu187Pro) | | | CTCTCCTCATCCAGATTGGA′] |
| 2114 | NM_000251.2(MSH2): c.595T > C | 4436 | MSH2 | [′CCTCATCCAGATTGGACCAAAGGAAYGTGT |
| | (p.Cys199Arg) | | | TTTACCCGGAGGAGAGACTGC′] |
| 2115 | NM_000251.2(MSH2): c.929T > C | 4436 | MSH2 | [′TTGGATATTGCAGCAGTCAGAGCCCBTAACC |
| | (p.Leu310Pro) | | | TTTTTCAGGTAAAAAAAAAA′] |
| 2116 | NM_007294.3(BRCA1): | 672 | BRCA1 | [′AAAGTGTGACCACATATTTTGCAAGBAAGTT |
| | c.134 + 2T > C | | | TGAATGTGTTATGTGGCTCC′] |
| 2117 | NM_001194998.1(CEP152): | 22995 | CEP152 | [′TATGAGGAAGACATCCTGACTGTACYTGGG |
| | c.3149T > C (p.Leu1050Pro) | | | GTTCTTTTAAGTGATACCCAA′] |
| 2118 | NM_001271723.1(FBXO38): | 81545 | FBXO38 | [′AGGGGTGAATGTTCCTGAAATTCCTYGTATC |
| | c.616T > C (p.Cys206Arg) | | | CCAATGCTAAGGCACCTTTA′] |
| 2119 | NM_014495.3(ANGPTL3): | −1 | — | [′ACATCGAATAGATGGATCACAAAACYTCAA |
| | c.883T > C (p.Phe295Leu) | | | TGAAACGTGGGAGAACTACAA′] |
| 2120 | NM_003184.3(TAF2): c.1945T > | 6873 | TAF2 | [′CTCTCATAGCGGAGCTGATACTGCCRCATAA |
| | C (p.Trp649Arg) | | | AATCAGCTTGCTCAAATTCT′] |
| 2121 | NM_000016.5(ACADM): | 34 | ACADM | [′TTCTTCTAGTATCCAGTCCCCCTAAYTAGAA |
| | c.233T > C (p.Ile78Thr) | | | GAGCCTGGGAACTTGGTTTA′] |
| 2122 | NM_000019.3(ACAT1): | 38 | ACAT1 | [′TTCCTGTCACAGTTACAGTAAAAGGYAGAG |
| | c.730 + 2T > C | | | ATAATGTTCCAAAAAGGATGA′] |
| 2123 | NM_000143.3(FH): c.1255T > C | 2271 | FH | [′GAAGCATCCCCCAGCAGCCTGGCTGRGTGT |
| | (p.Ser419Pro) | | | AACACATTTTTAATCTTTGAG′] |
| 2124 | NM_000169.2(GLA): c.899T > C | −1 | — | [′GCTCCTTTATTCATGTCTAATGACCYCCGAC |
| | (p.Leu300Pro) | | | ACATCAGCCCTCAAGCCAAA′] |
| 2125 | NM_000202.6(IDS): c.587T > C | 3423 | IDS | [′GTGCTGGATGTTCCCGAGGGCACCTYGCCTG |
| | (p.Leu196Ser) | | | ACAAACAGAGCACTGAGCAA′] |
| 2126 | NM_000252.2(MTM1): c.688T > | 4534 | MTM1 | [′TCTGACTTAACCATAGGTGCTGTCAYGGATT |
| | C (p.Trp230Arg) | | | CATCCAGAAAATAAGACGGT′] |
| 2127 | NM_000277.1(PAH): c.638T > C | 5053 | PAH | [′GAGTACAATCACATTTTTCCACTTCYTGAAA |
| | (p.Leu213Pro) | | | AGTACTGTGGCTTCCATGAA′] |
| 2128 | NM_000404.2(GLB1): | 2720 | GLB1 | [′TTCTTCTCCGCTCCTCCGACCCAGGYAGGTT |
| | c.457 + 2T > C | | | GTTACAGATGTCTTGAGAAG′] |
| 2129 | NM_000528.3(MAN2B1): | 4125 | MAN2B1 | [′AGAGATGGCTCGCTGGAGCTCATGGYGAGT |
| | c.2436+ 2T > C | | | GGGTCAGAGCCCCATCCGAGC′] |
| 2130 | NM_000531.5(OTC): | 5009 | OTC | [′CTGGCTGATTACCTCACGCTCCAGGHTGGTT |
| | c.540 + 2T > C | | | TATTTATTTGTCTTACAAAA′] |
| 2131 | NM_001005741.2(GBA): | 2629 | GBA | [′TTCACCGCTCCATTGGTCTTGAGCCRAGTGG |
| | c.667T > C (p.Trp223Arg) | | | GTGATGTCCAGGGGCTGGCA′] |
| 2132 | NM_000402.4(G6PD): c.473T > C | 2539 | G6PD | [′CGCCTCAACAGCCACATGAATGCCCYCCAC |
| | (p.Leu158Pro) | | | CTGGGGTCACAGGCCAACCGC′] |
| 2133 | NM_000402.4(G6PD): c.188T > C | −1 | — | [′CACCGATGCACCCATGATGATGAATRTGTGT |
| | (p.Ile63Thr) | | | GTATCCGACTGATGGAAGGC′] |
| 2134 | NM_006920.4(SCN1A): | −1 | — | [′GGGTATCTCTCTTTGCTTCAAGTTGYAAGTG |
| | c.4251 + 2T > C | | | AACACTATTTTCTCTGAATA′] |
| 2135 | NM_002225.3(IVD): | 3712 | IVD | [′CAGAAAGAGAAGTATCTCCCGAAGGYGAGG |
| | c.465 + 2T > C | | | AAATGGAAATGTAATACACGC′] |
| 2136 | NM_003494.3(DYSF): | 8291 | DYSF | [′GAGGTCAGCTTTGCGGGGAAAATGGYAAGG |
| | c.1284 + 2T > C | | | AGCAAGGGAGCAGGAGGGTTC′] |
| 2137 | NM_004006.2(DMD): | 1756 | DMD | [′CCCTGGTGGAACAGATGGTGAATGGYAATT |
| | c.2380 + 2T > C | | | ACACGAGTTGATTTAGATAAT′] |
| 2138 | NM_012463.3(ATP6V0A2): | 23545 | ATP6V0A2 | [′ACCCGCATCCAGGATCTCTACACTGYGAGTA |
| | 5c.82 + 2T > C | | | AGCTGGAAGTGGATTGCCTC′] |
| 2139 | NM_014795.3(ZEB2): | 9839 | ZEB2 | [′AAGCCAATCCCAGGAGGAAAAACGGYAAG |
| | c.73 + 2T >C | | | AAGCAGCCCGAACCAAACTTTT′] |
| 2140 | NM_016725.2(FOLR1): | 2348 | FOLR1 | [′ACAAGGGCTGGAACTGGACTTCAGGYGAGG |
| | c.493 + 2T > C | | | GCTGGGGTGGGCAGGAATGGA′] |
| 2141 | NM_000056.3(BCKDHB): | 594 | BCKDHB | [′CCTGTTCTGTATTTAGCGGAAGAAGYCCCTA |
| | c.752T > C (p. Val251Ala) | | | TAGAACCATACAACATCCCA′] |
| 2142 | NM_175053.3(KRT74): c.821T > | 121391 | KRT74 | [′TACTGCATCATACAGACACTTGAGGRACTTG |
| | C (p.Phe274Ser) | | | ATTTCTTTGTCCAGTGAGTC′] |
| 2143 | NM_003764.3(STX11): c.173T > | 8676 | STX11 | [′GACATTCAGGATGAAAACCAGCTGCYGGTG |
| | C (p.Leu58Pro) | | | GCCGACGTGAAGCGGCTGGGA′] |
| 2144 | NM_001044.4(SLC6A3): | 6531 | SLC6A3 | [′CTCTGCAGACGTGGCGTGCTGCACCYCCACC |
| | c.671T > C (p.Leu224Pro) | | | AGAGCCATGGCATCGACGAC′] |
| 2145 | NM_015662.2(IFT172): | −1 | — | [′CTGATGAATTTCAGCACGTCCTGGCRCACTG |
| | c.5179T > C (p.Cys1727Arg) | | | GGCTGTGGGAGGTCTGTGAG′] |
| 2146 | NM_015662.2(IFT172): | 26160 | IFT172 | [′GCGCGTGGCATAGTAATGAGCGATCRGCAG |
| | c.4607T > C (p.Leu1536Pro) | | | CATCGTCTTGAACTCCTCATG′] |
| 2147 | NM_014754.2(PTDSS1): | 9791 | PTDSS1 | [′ACCGGGAAGATCAAGAGAGCTGTTCYGCAG |
| | c.794T > C (p.Leu265Pro) | | | TTCACTCCTGCTAGCTGGACC′] |
| 2148 | NM_014714.3(IFT140): | 9742 | IFT140 | [′GGACCCCAAGGAGTCCATCAAGCAGYGTGA |
| | c.4078T > C (p.Cys1360Arg) | | | GCTGCTCCTGGAGGAACCAGA′] |
| 2149 | NM_000531.5(OTC): | 5009 | OTC | [′GAAAACAGAAAGTGGACAATCATGGYAAGC |
| | c.1005 + 2T > C | | | AAGAAACAAGGAATGGAGGAT′] |
| 2150 | NM_000531.5(OTC): c.1018T > C | 5009 | OTC | [′GTTGTGTCATCAGGCTGTCATGGTGYCCCTG |
| | (p.Ser340Pro) | | | CTGACAGATTACTCACCTCA′] |
| 2151 | NM_000531.5(OTC): c.1022T > C | 5009 | OTC | [′TGTCATCAGGCTGTCATGGTGTCCCYGCTGA |
| | (p.Leu341Pro) | | | CAGATTACTCACCTCAGCTC′] |
| 2152 | NM_000531.5(OTC): c.1033T > C | 5009 | OTC | [′TGTCATGGTGTCCCTGCTGACAGATBACTCA |
| | (p.Tyr345His) | | | CCTCAGCTCCAGAAGCCTAA′] |
| 2153 | NM_000531.5(OTC): c.143T > C | 5009 | OTC | [′CGTGACCTTCTCACTCTAAAAAACTYTACCG |
| | (p.Phe48Ser) | | | GAGAAGAAATTAAATATATG′] |
| 2154 | NM_000531.5(OTC): c.158T > C | 5009 | OTC | [′CTAAAAAACTTTACCGGAGAAGAAABTAAA |
| | (p.Ile53Thr) | | | TATATGCTATGGCTATCAGCA′] |
| 2155 | NM_000531.5(OTC): c.167T > C | 5009 | OTC | [′TTTACCGGAGAAGAAATTAAATATAYGCTA |
| | (p.Met56Thr) | | | TGGCTATCAGCAGATCTGAAA′] |
| 2156 | NM_000531.5(OTC): c.188T > C | 5009 | OTC | [′TATATGCTATGGCTATCAGCAGATCYGAAAT |
| | (p.Leu63Pro) | | | TTAGGATAAAACAGAAAGGA′] |
| 2157 | NM_000531.5(OTC): c.227T > C | 5009 | OTC | [′GTCCTTGATTTATAGTATTTGCCTTYATTGCA |
| | (p.Leu76Ser) | | | AGGGAAGTCCTTAGGCATG′] |
| 2158 | NM_000531.5(OTC): c.284T > C | 5009 | OTC | [′GAGAAAAGAAGTACTCGAACAAGATYGTCT |
| | (p.Leu95Ser) | | | ACAGAAACAGGTAAGTCCACT′] |
| 2159 | NM_000531.5(OTC): c.2T > C | 5009 | OTC | [′CGTCCTTTACACAATTAAAAGAAGAYGCTGT |
| | (p.Met1Thr) | | | TTAATCTGAGGATCCTGTTA′] |
| 2160 | NM_000531.5(OTC): | 5009 | OTC | [′TGAAAGTCTCACGGACACGGCCCGGYTTGT |
| | c.386 + 2T > C | | | AAATATTTTCTTCTCTCCAAA′] |
| 2161 | NM_000531.5(OTC): c.392T > C | 5009 | OTC | [′TTTTTCTTGGTTTGCCACAGTGTATYGTCTAG |
| | (p.Leul31Ser) | | | CATGGCAGATGCAGTATTG′] |
| 2162 | NM_000531.5(OTC): c.394T > C | 5009 | OTC | [′TTTCTTGGTTTGCCACAGTGTATTGYCTAGC |
| | (p.Ser132Pro) | | | ATGGCAGATGCAGTATTGGC′] |
| 2163 | NM_000531.5(OTC): c.416T > C | 5009 | OTC | [′TTGTCTAGCATGGCAGATGCAGTATYGGCTC |
| | (p.Leu139Ser) | | | GAGTGTATAAACAATCAGAT′] |
| 2164 | NM_000531.5(OTC): c.443T > C | 5009 | OTC | [′GCTCGAGTGTATAAACAATCAGATTBGGAC |
| | (p.Leu148Ser) | | | ACCCTGGCTAAAGAAGCATCC′] |
| 2165 | NM_000531.5(OTC): c.476T > C | 5009 | OTC | [′CTGGCTAAAGAAGCATCCATCCCAAYTATC |
| | (p.Ile159Thr) | | | AATGGGCTGTCAGATTTGTAC′] |
| 2166 | NM_000531.5(OTC): c.479T > C | 5009 | OTC | [′GCTAAAGAAGCATCCATCCCAATTANCAAT |
| | (p.Ile160Thr) | | | GGGCTGTCAGATTTGTACCAT′] |
| 2167 | NM_000531.5(OTC): c.490T > C | 5009 | OTC | [′ATCCATCCCAATTATCAATGGGCTGYCAGAT |
| | (p.Ser164Pro) | | | TTGTACCATCCTATCCAGAT′] |
| 2168 | NM_000531.5(OTC): c.526T > C | 5009 | OTC | [′CCATCCTATCCAGATCCTGGCTGATYACCTC |
| | (p.Tyr176His) | | | ACGCTCCAGGTTGGTTTATT′] |
| 2169 | NM_000531.5(OTC): c.536T > C | 5009 | OTC | [′CAGATCCTGGCTGATTACCTCACGCYCCAGG |
| | (p.Leul79Pro) | | | TTGGTTTATTTATTTGTCTT′] |
| 2170 | NM_000531.5(OTC): c.577T > C | 5009 | OTC | [′CTCTCTGAAAGGTCTTACCCTCAGCBGGATC |
| | (p.Trp193Arg) | | | GGGGATGGGAACAATATCCT′] |
| 2171 | NM_000531.5(OTC): c.602T > C | 5009 | OTC | [′TGGATCGGGGATGGGAACAATATCCYGCAC |
| | (p.Leu201Pro) | | | TCCATCATGATGAGCGCAGCG′] |
| 2172 | NM_000531.5(OTC): | 5009 | OTC | [′CACCTTCAGGCAGCTACTCCAAAGGYAGGG |
| | c.663 + 2T > C | | | AAACTTTTTGCCTTGAAACTA′] |
| 2173 | NM_000531.5(OTC): c.779T > C | 5009 | OTC | [′GAAGCAGCGCATGGAGGCAATGTATYAATT |
| | (p.Leu260Ser) | | | ACAGACACTTGGATAAGCATG′] |
| 2174 | NM_000531.5(OTC): c.793T > C | 5009 | OTC | [′AGGCAATGTATTAATTACAGACACTYGGAT |
| | (p.Trp265Arg) | | | AAGCATGGGACAAGAAGAGGA′] |
| 2175 | NM_000531.5(OTC): c.803T > C | 5009 | OTC | [′TTAATTACAGACACTTGGATAAGCAYGGGA |
| | (p.Met268Thr) | | | CAAGAAGAGGAGAAGAAAAAG′] |
| 2176 | NM_000531.5(OTC): c.907T > C | 5009 | OTC | [′TGCCTCTGACTGGACATTTTTACACBGCTTG |
| | (p.Cys303Arg) | | | CCCAGAAAGCCAGAAGAAGT′] |
| 2177 | NM_000531.5(OTC): c.947T > C | 5009 | OTC | [′CCAGAAGAAGTGGATGATGAAGTCTYTTAT |
| | (p.Phe316Ser) | | | TCTCCTCGATCACTAGTGTTC′] |
| 2178 | NM_000322.4(PRPH2): c.637T > | 5961 | PRPH2 | [′CCTGGTGGACGGCGTCCCTTTCAGCYGCTGC |
| | C (p.Cys213Arg) | | | AATCCTAGCTCGCCACGGCC′] |
| 2179 | NM_000322.4(PRPH2): c.736T > | 5961 | PRPH2 | [′CCACCAGACGGAGGAGCTCAACCTGYGGGT |
| | C (p.Trp246Arg) | | | GCGTGGCTGCAGGGCTGCCCT′] |
| | NM_017415.2(KLHL3): | 26249 | KLHL3 | [] |
| | c.1160T > C (p.Leu387Pro) | | | |
| | NM_017415.2(KLHL3): | 26249 | KLHL3 | [] |
| | c.1280T > C (p.Met427Thr) | | | |
| 2180 | NM_003859.1(DPM1): c.742T > C | −1 | — | [′AGAGTCAATAATCCTTTCAAGAAAGRTACTA |
| | (p.Ser248Pro) | | | TTTCATTTCCTCCCAACTTG′] |
| 2181 | NM_004826.3(ECEL1): | 9427 | ECEL1 | [′GGGTTCATGGGTGAGTCCTTGGGACRGTGG |
| | c.2278T > C (p.Cys760Arg) | | | AAAGCCCGGCCAAACTCCTCA′] |
| 2182 | NM_014908.3(DOLK): c.2T > C | 22845 | DOLK | [′GGCCGGAGATGGGCACTCTCGGGTCRTATCT |
| | (p.Met1Thr) | | | CTAGACCTGGGGCTTCACGG′] |
| 2183 | NM_000404.2(GLB1): c.922T > C | 2720 | GLB1 | [′TCTTTTGTTTCCTTGTAGGTACATGYTTATAG |
| | (p.Phe308Leu) | | | GTGGGACCAATTTTGCCTA′] |
| 2184 | NM_012434.4(SLC17A5): | 26503 | SLC17A5 | [′TTAGGAGTTGGACCACTCATTGTACYCAGAG |
| | c.500T > C (p.Leu167Pro) | | | CACTAGAAGGACTAGGAGAG′] |
| 2185 | NM_000211.4(ITGB2): | 3689 | ITGB2 | [′CCCCTCACCCTGTGGCAAGTACATGYGAGTG |
| | c.1877 + 2T > C | | | CAGGCGGAGCAGGCAGGGCG′] |
| 2186 | NM_006702.4(PNPLA6): | 10908 | PNPLA6 | [′ACCTCCATGTTCACTGGGTCTGCCTYTAACC |
| | c.3053T > C (p.Phe1018Ser) | | | GCAGCATCCATCGGGTCTTC′] |
| 2187 | NM_176787.4(PIGN): c.808T > C | 23556 | PIGN | [′TCTGAAGGATGACCAGCCCCATGGGRACCT |
| | (p.Ser270Pro) | | | ACAAATAAGATATAAAGAATA′] |
| 2188 | NM_001165899.1(PDE4D): | 5144 | PDE4D | [′CCATGTCTCCCAGAGGGGATGAACARTATA |
| | c.1850T > C (p.Ile617Thr) | | | GTCTATGAAGCCCACCTAGTT′] |
| 2189 | NM_005017.3(PCYT1A): | 5130 | PCYT1A | [′CCTTCTGTCCTCTGTGTTGGAGCAARCATGC |
| | c.571T > C (p.Phe191Leu) | | | CTAACTCAGAAACACATACA′] |
| 2190 | NM_000090.3(COL3A1): | 1281 | COL3A1 | [′CAGGACTTCCTGGGGCTGCAGTGAGHATAG |
| | c.951 + 6T > C | | | CTGCTAACATCACACAATTAC′] |
| | (p.Gly300_Ala317del) | | | |
| 2191 | NM_000090.3(COL3A1): | 1281 | COL3A1 | [′GCACCTGGAGCTCCAGGAGGCAAGGYAGTA |
| | c.2022 + 2T > C | | | TTTCAATTTATTCTCTACCTT′] |
| | (p.Gly660_Lys674del) | | | |
| 2192 | NM_000090.3(COL3A1): | 1281 | COL3A1 | [′CGGCCAGGACTTCCTGGGGCTGCAGHGAGT |
| | c.951 + 2T > C | | | ATAGCTGCTAACATCACACAA′] |
| | (p.Gly300_Ala317del) | | | |
| 2193 | NM_000090.3(COL3A1): | 1281 | COL3A1 | [′CGAGATGGATCTCCTGGTGGCAAGGBATAA |
| | c.3093 + 2T > C | | | TAAACACATGTGCAATTGATT′] |
| | (p.Gly1014_Lys1031del) | | | |
| 2194 | NM_000090.3(COL3A1): | 1281 | COL3A1 | [′CCAGCTGGCCAGCCTGGAGATAAGGYAACC |
| | c.2337 + 2T > C | | | CTTAATACTACCTGGATATAA′] |
| | (p.Gly762_Lys779del) | | | |
| 2195 | NM_000090.3(COL3A1): | 1281 | COL3A1 | [′TTCCCCGGTCCTAAAGGAAATGATGBGAGTT |
| | c.1761 + 2T > C | | | CCTTCATTAATTTCTTCAAT′] |
| | (p.Gly555_Asp587del) | | | |
| 2196 | NM_000090.3(COL3A1): | 1281 | COL3A1 | [′CTGGTGAACCTGGAAGAGATGTGAGYAGCA |
| | c.3039 + 6T > C | | | GTTTTTATTCAACCAGCCAGG′] |
| | (p.Asp1013_ | | | |
| | Gly1014insVSSSFYSTSQ) | | | |
| 2197 | NM_000090.3(COL3A1): c.4399 | 1281 | COL3A1 | [′GGACGTTGGCCCTGTTTGCTTTTTAYAAACC |
| | T > C (p.Ter1467Gln) | | | AAACTCTATCTGAAATCCCA′] |
| 2198 | NM_000090.3(COL3A1): | 1281 | COL3A1 | [′CCCCCTGGAGGTTCTGGACCTGCTGYAAGTT |
| | c.2553 + 2T > C | | | CCTTCCTCTTTCTCTGTCTA′] |
| | (p.Gly816_Ala851del) | | | |
| 2199 | NM_001278503.1(STT3A): | 3703 | STT3A | [′TATACTCCAACTGGGGAGTTCCGTGYGGACC |
| | c.1877T > C (p.Val626Ala) | | | GTGAAGGTTCTCCAGTGCTG′] |
| 2200 | NM_000277.1(PAH): c.691T > C | 5053 | PAH | [′TAACATTCCCCAGCTGGAAGACGTTYCTCAG |
| | (p.Ser231Pro) | | | TTCCTGCAGAGTAAGTCCAC′] |
| 2201 | NM_007294.3(BRCA1): | 672 | BRCA1 | [′GGACAGAGGACAATGGCTTCCATGGBAAGG |
| | c.5467 + 2T > C | | | TGCCTGCATGTACCTGTGCTA′] |
| 2202 | NM_020347.3(LZTFL1): | 54585 | LZTFL1 | [′ATACCACTTCTCAGCTTGTGCAAACRGCTGT |
| | c.260T > C (p.Leu87Pro) | | | CGCAGAAGTAACACATTGGT′] |
| 2203 | NM_016381.5(TREX1): c.530T > | 11277 | TREX1 | [′CGCCAGCCACAGCCCTGGTGCCTGGYGGCA |
| | C (p.Val177Ala) | | | CACAATGGTGACCGCTACGAC′] |
| 2204 | NM_015474.3(SAMHD1): | 25939 | SAMHD1 | [′TTTGTGTTGATAAGCTCTACGGTGTRAAGAG |
| | c.1106T > C (p.Leu369Ser) | | | TTGCGAGTGTGGAACATGTC′] |
| 2205 | NM_005654.5(NR2F1): c.755T > | 7025 | NR2F1 | [′CAGATCACCGACCAGGTGTCCCTGCYACGC |
| | C (p.Leu252Pro) | | | CTCACCTGGAGCGAGCTGTTC′] |
| 2206 | NM_003638.2(ITGA8): | 8516 | ITGA8 | [′TGCCTATATATATTTAAAGATACTCRCTACT |
| | c.2982 + 2T > C | | | ATGCTTCCTTCTGGGAGTTT′] |
| 2207 | NM_000321.2(RB1): | 5925 | RB1 | [′AGGATCAGATGAAGCAGATGGAAGGYAGG |
| | c.2663 + 2T > C | | | AACCAGTTTTGAATGTTTTCCA′] |
| 2208 | NM_000321.2(RB1): c. 1472T > C | 5925 | RB1 | [′CATATGTCTTTATTGGCGTGCGCTCYTGAGG |
| | (p.Leu491Pro) | | | TTGTAATGGCCACATATAGC′] |
| 2209 | NM_015884.3(MBTPS2): | 51360 | MBTPS2 | [′GCTATTGTTAATGCAGTACCCTGCTYTGCTT |
| | c.1391T > C (p.Phe464Ser) | | | TGGATGGACAATGGATTCTA′] |
| 2210 | NM_001739.1(CA5A): c.697T > C | 763 | CA5A | [′TCGGTCAGCGGCGGGGTGGTGAGCGRGCCC |
| | (p.Ser233Pro) | | | GCGTAGGTCCAGTAATCCCAG′] |
| 2211 | NM_005051.2(QARS): c.169T > C | 5859 | QARS | [′TCCCTGAGTCGGGAGGCCAAGCCATRTAAC |
| | (p.Tyr57His) | | | AGGATCCCGGTAGCTTTGTCA′] |
| 2212 | NM_005356.4(LCK): c. 1022T > C | 3932 | LCK | [′GGCATCAAGTTGACCATCAACAAACYCCTG |
| | (p.Leu341Pro) | | | GACATGGCAGCCCAAGTAAGG′] |
| 2213 | NM_021803.3(IL21): c. 146T > C | 59067 | IL21 | [′TACCAAGTCATTCACATAATTTTTCRGCTGA |
| | (p.Leu49Pro) | | | TCAACAATATCTATAAGTTG′] |
| 2214 | NM_005861.3(STUB1): c.719T > | −1 | — | [′TGTGGCAAGATCAGCTTTGAGCTGAYGCGG |
| | C (p.Met240Thr) | | | GAGCCGTGCATCACGCCCAGT′] |
| 2215 | NM_032575.2(GLIS2): c.523T > C | 84662 | GLIS2 | [′TCAGAACACTTCCCATCCTCCGCAGYGTAAC |
| | (p.Cys175Arg) | | | CAGCTCTTTGAGCTCCTGCA′] |
| 2216 | NM_001101.3(ACTB): c.224T > C | 60 | ACTB | [′CTGAAGTACCCCATCGAGCACGGCAYCGTC |
| | (p.Ile75Thr) | | | ACCAACTGGGACGACATGGAG′] |
| 2217 | NM_001101.3(ACTB): c.356T > C | 60 | ACTB | [′AACCCCAAGGCCAACCGCGAGAAGAYGACC |
| | (p.Met119Thr) | | | CAGGTGAGTGGCCCGCTACCT′] |
| 2218 | NM_003401.3(XRCC4): c.127T > | 7518 | XRCC4 | [′TACACTTACTGATGGTCATTCAGCAYGGACT |
| | C (p.Trp43Arg) | | | GGGACAGGTAATACTAAAAA′] |
| 2219 | NM_000051.3(ATM): | 472 | ATM | [′CTGGAGAGAGCCAAAGTACCATAGGYAAAT |
| | c.2638 + 2T > C | | | ACATATTTACTACTTGGGATT′] |
| 2220 | NM_000535.5(PMS2): c.2T > C | 5395 | PMS2 | [′CGAGGCGGATCGGGTGTTGCATCCAHGGAG |
| | (p.Met1Thr) | | | CGAGCTGAGAGCTCGAGGTGA′] |
| 2221 | NM_015713.4(RRM2B): c.190T > | 50484 | RRM2B | [′ATGCCACGTACCTCTTCTGCTGTCCRGAAGG |
| | C (p.Trp64Arg) | | | AAGCCTGTGCCTGTTTATAC′] |
| 2222 | NM_015713.4(RRM2B): c.368T > | 50484 | RRM2B | [′CTCGATGAGAATTTGAAAGCCATAGRAACA |
| | C (p.Phe123Ser) | | | GCGAGCCTCTGGAACCTGCAC′] |
| 2223 | NM_003122.4(SPINK1): | 6690 | SPINK1 | [′TTAAAAGAAACTCAAGTTTGTACTCRCCGAT |
| | c.194 + 2T > C | | | TTTCAAAACATAACACGCAT′] |
| 2224 | NM_003122.4(SPINK1): c.160T > | 6690 | SPINK1 | [′AAACATAACACGCATTCATTGGGATRAGTAT |
| | C (p.Tyr54His) | | | TTCCATCAGTCCCACAGACA′] |
| | NM_000219.5(KCNE1): c.158T > | 3753 | KCNE1 | [] |
| | C (p.Phe53Ser) | | | |
| 2225 | NM_000219.5(KCNE1): c.176T > | 3753 | KCNE1 | [′GCGGATGTAGCTCAGCATGATGCCCRGGGT |
| | C (p.Leu59Pro) | | | GAAGAAGCCGAAGAATCCCAG′] |
| | NM_000219.5(KCNE1): c.259T > | 3753 | KCNE1 | [] |
| | C (p.Trp87Arg) | | | |
| 2226 | NM_017890.4(VPS13B): | 157680 | VPS13B | [′CGTTTGTAAAGCACATCTCCAAAGGYAGCG |
| | c.11119 + 2T > C | | | GGTTCCGTTCCTTGTAATAAT′] |
| 2227 | NM_005026.3(PIK3CD): | 5293 | PIK3CD | [′CACCTGCCCTGTCCTTCTGCAGGACYGCCCC |
| | c.1246T > C (p.Cys416Arg) | | | ATTGCCTGGGCCAACCTCAT′] |
| 2228 | NM_000271.4(NPC1): c.2054T > | 4864 | NPC1 | [′TACATTGGGTTGCCCTTGACCCTCAYTGTGA |
| | C (p.Ile685Thr) | | | TTGAAGTCATCCCGTTCCTG′] |
| 2229 | NM_002633.2(PGM1): c.1547T > | 5236 | PGM1 | [′GGGAGTGCCGGGGCCACCATTCGGCYGTAC |
| | C (p.Leu516Pro) | | | ATCGATAGCTATGAGAAGGAC′] |
| 2230 | NM_015599.2(PGM3): c.248T > C | 5238 | PGM3 | [′TTGGTTGATCCTTTGGGTGAAATGTYGGCAC |
| | (p.Leu83Ser) | | | CATCCTGGGAGGAACATGCC′] |
| 2231 | NM_002136.2(HNRNPA1): | 3178 | HNRNPA1 | [′GAATTACAACAATCAGTCTTCAAATBTTGGA |
| | c.817T > C (p.Phe273Leu) | | | CCCATGAAGGGAGGAAATTT′] |
| 2232 | NM_002136.2(HNRNPA1): | 3178 | HNRNPA1 | [′TTTTGGACCCATGAAGGGAGGAAATYTTGG |
| | c.841T > C (p.Phe281Leu) | | | AGGCAGAAGCTCTGGCCCCTA′] |
| 2233 | NM_001159287.1(TPI1): | 7167 | TPI1 | [′GGTGGTGCTTCCCTCAAGCCCGAATYCGTGG |
| | c.833T > C (p.Phe278Ser) | | | ACATCATCAATGCCAAACAA′] |
| 2234 | NM_130838.1(UBE3A): c.2T > C | 7337 | UBE3A | [′TCTGACGACATTGAAGCTAGCCGAAYGTAA |
| | (p.Met1Thr) | | | GTGTAACTTGGTTGAGACTGT′] |
| 2235 | NM_130838.1(UBE3A): c.710T > | 7337 | UBE3A | [′ATTGAAACTGCCTTTCTCAATGCACHTGTAT |
| | C (p.Leu237Pro) | | | ATTTGTCACCTAACGTGGAA′] |
| 2236 | NM_000414.3(HSD17B4): | 3295 | HSD17B4 | [′AGTGGAGACTGGAATCCCTTACACAYTGAT |
| | c.1547T > C (p.Ile516Thr) | | | CCTAACTTTGCTAGTCTAGCA′] |
| 2237 | NM_022068.3(PIEZO2): | 63895 | PIEZO2 | [′GTCCATTTGATCATTGTCTCTGGTGRGCGAT |
| | c.8215T > C (p.Ser2739Pro) | | | ATAGGAATATTAATTTGGCA′] |
| 2238 | NM_012079.5(DGAT1): | 8694 | DGAT1 | [′GCACCTCAGGCCCACAGAGGTCCTCRCCGC |
| | c.751 + 2T > C | | | GGTAGGTCAGATTGTCCGGGT′] |
| 2239 | NM_003108.3(SOX11): c.178T > | 6664 | SOX11 | [′GCCGATGAACGCGTTCATGGTATGGYCCAA |
| | C (p.Ser60Pro) | | | GATCGAACGCAGGAAGATCAT′] |
| 2240 | NM_021072.3(HCN1): c.814T > C | 348980 | HCN1 | [′TGATGTATGTATCTAATTAACCTTGRAAGTC |
| | (p.Ser272Pro) | | | GTAATAAACGCAAGAGACTG′] |
| 2241 | NM_001079867.1(PEX2): | 5828 | PEX2 | [′CACCAGTGGCAAAGAATGCGCTCTAYGTGG |
| | c.739T > C (p.Cys247Arg) | | | AGAGTGGCCCACCATGCCTCA′] |
| 2242 | NM_022552.4(DNMT3A): | 1788 | DNMT3A | [′CTGAATGCCCAAGTCCTTCAGCACCRGGAGC |
| | c.1943T > C (p.Leu648Pro) | | | CCTGCACCAGCCAGCAGACA′] |
| 2243 | NM_022552.4(DNMT3A): | 1788 | DNMT3A | [′CGCAAAATACTCCTTCAGCGGAGCGRAGAG |
| | c.2705T > C (p.Phe902Ser) | | | GTGGCGGATGACTGGCACGCT′] |
| 2244 | NM_018400.3(SCN3B): c.482T > | 55800 | SCN3B | [′GAGGAAGACCAGAAGGATGTACATCRTGAT |
| | C (p.Met161Thr) | | | TTCTGAGACCACAGAGGTGAA′] |
| 2245 | NM_000406.2(GNRHR): | 2798 | GNRHR | [′TTCTCCATGTATGCCCCAGCCTTCAYGATGG |
| | c.392T > C (p.Met131Thr) | | | TGGTGATCAGCCTGGACCGC′] |
| 2246 | NM_001030001.2(RPS29): | 6235 | RPS29 | [′GCAGACGCCTACCTTAATGAAACCGRTATCC |
| | c.149T > C (p.Ile50Thr) | | | TTCGCGTACTGACGGAAACA′] |
| 2247 | NM_177550.4(SLC13A5): | 284111 | SLC13A5 | [′CAGGGTACAGGGCAGCATGATGTACRGCGG |
| | c.1463T > C (p.Leu488Pro) | | | ATTGAGGCCGATGGAGCGAGA′] |
| 2248 | NM_004464.3(FGF5): c.520T > C | 2250 | FGF5 | [′TTTTCAAGAAAATAGCTATAATACCBATGCC |
| | (p.Tyr174His) | | | TCAGCAATACATAGAACTGA′] |
| 2249 | NM_000051.3(ATM): | 472 | ATM | [′AGAGGACCCTTTTCACTCTTGGAGGYAATAA |
| | c.4776 + 2T > C | | | AAATTTCATCATCTACTATT′] |
| 2250 | NM_002880.3(RAF1): c.1808T > | 5894 | RAF1 | [′GTGTTGGAGCAGCTCAATGGAAGACRGGAT |
| | C (p.Leu603Pro) | | | CTGAAACAAAGCCCAAGAATG′] |
| 2251 | NM_000251.2(MSH2): | 4436 | MSH2 | [′GTCAGAGCCCTTAACCTTTTTCAGGBAAAAA |
| | c.942 + 2T > C | | | AAAAAAAAAAAAAAAAAAAA′] |
| 2252 | NM_001077620.2(PRCD): c.2T > | −1 | — | [′GGGAGGGGATGGGGCAGCTGCGCCAYGTGC |
| | C (p.Met1Thr) | | | ACCACCCTTTTCCTGCTCAGC′] |
| 2253 | NM_001142800.1(EYS): | 34600 | EYS | [′AGCCACAAAGTTTTTATGTGGATCARTATCC |
| | c.9209T > C (p.Ile3070Thr) | 7 | | TCGGAAAGAATTAGACTGTT′] |
| 2254 | NM_206933.2(USH2A): | 7399 | USH2A | [′TCCTAAATTGACAGGTGAAGTATGCYGTCCA |
| | c.9751T > C (p.Cys3251Arg) | | | GATGAACAGCACAATCGGGT′] |
| 2255 | NM_000257.3(MYH7): c.4442T > | −1 | — | [′GAGGCTCGCTCCCTCAGCACAGAGCYCTTCA |
| | C (p.Leu1481Pro) | | | AACTCAAGAACGCCTATGAG′] |
| 2256 | NM_000257.3(MYH7): c.4835T > | −1 | — | [′GAGACACGCAGCCGCAACGAGGCCCYGAGG |
| | C (p.Leu1612Pro) | | | GTGAAGAAGAAGATGGAAGGA′] |
| 2257 | NM_000257.3(MYH7): c.4937T > | −1 | — | [′GAGGCCCAGAAGCAAGTCAAGAGCCYCCAG |
| | C (p.Leu1646Pro) | | | AGCTTGTTGAAGGTACTCACC′] |
| 2258 | NM_001199138.1(NLRC4): c.10 | 58484 | NLRC4 | [′AATCTCATGAAGACCCCTCTCTTTGYGGTCA |
| | 22T > C (p.Val341Ala) | | | TCACTTGTGCAATCCAGATG′] |
| 2259 | NM_000076.2(CDKNIC): | 1028 | CDKNIC | [′GCGCAAGAGGCTGCGGTGAGCCAAGYGAGT |
| | c.*5 + 2T > C | | | ACAGCGCACCTGGGGGGGCGC′] |
| 2260 | NM_003159.2(CDKL5): c.659T > | 6792 | CDKL5 | [′CCTGGAGAAAGTGAAATTGACCAACYTTTT |
| | C (p.Leu220Pro) | | | ACTATTCAGAAGGTGCTAGGA′] |
| 2261 | NM_005027.3(PIK3R2): | 5296 | PIK3R2 | [′CTCACCTTCTGCTCCGTTGTGGACCYCATCA |
| | c.1202T > C (p.Leu401Pro) | | | ATCACTACCGCCACGAGTCT′] |
| 2262 | NM_173596.2(SLC39A5): | 283375 | SLC39A5 | [′TTCCTGCTCTTTGTGCTGGAGAACAYGCTGG |
| | c.911T > C (p.Met304Thr) | | | GGCTTTTGCGGCACCGAGGG′] |
| 2263 | NM_153334.6(SCARF2): | 91179 | SCARF2 | [′CCTTGCTGCCTCCAGCCAGCGCAGCRCGTGG |
| | c.190T > C (p.Cys64Arg) | | | GCACCTGGGAGCTGCGAGCA′] |
| 2264 | NM_001288767.1(ARMC5): | 79798 | ARMC5 | [′GGGGCACTTGTGACCGGCCCGGCGCYGTAC |
| | c.1928T > C (p.Leu643Pro) | | | GGCCTGCTGACCTATGTGACC′] |
| 2265 | NM_001288767.1(ARMC5): | 79798 | ARMC5 | [′CGTGAGGCCATCAACCGGGCCCGACYGCGG |
| | c.1379T > C (p.Leu460Pro) | | | GATGCTGGTGGCTTGGATCTA′] |
| 2266 | NC_012920.1: m.9478T > C | 4514 | MT-CO3 | [′ATAATCCTATTTATTACCTCAGAAGYTTTTTT |
| | | | | CTTCGCAGGATTTTTCTGA′] |
| 2267 | NC_012920.1: m.11984T > C | 4538 | MT-ND4 | [′ACTAGTCACAGCCCTATACTCCCTCYACATA |
| | | | | TTTACCACAACACAATGGGG′] |
| 2268 | NM_014845.5(FIG4): c.50T > C | 9896 | FIG4 | [′ATCAGCTCGGTCCAGAAGCTGGTTCYGTATG |
| | (p.Leul7Pro) | | | AGACTAGAGCTGTGAGTACC′] |
| 2269 | NM_003159.2(CDKL5): | 6792 | CDKL5 | [′TCAAGAAATTCAAGGACAGTGAAGGYAGAT |
| | c.145 + 2T > C | | | ATATATATATATATATATATA′] |
| 2270 | NM_002775.4(HTRA1): | 5654 | HTRA1 | [′CCATCTGATAAGATTAAAAAGTTCCYCACG |
| | c.1091T > C (p.Leu364Pro) | | | GAGTCCCATGACCGACAGGCC′] |
| 2271 | NM_021870.2(FGG): c.1210T > C | 2266 | FGG | [′ATCTTCATAGTGGTTTTCTTCATGGRATACC |
| | (p.Ser404Pro) | | | ACCGGGTTTTCCAAGTGGCC′] |
| 2272 | NM_017617.3(NOTCH1): | 4851 | NOTCH1 | [′TCGAAGGAGCCCAGCGTGTTGATGCRCTTGC |
| | c.1285T > C (p.Cys429Arg) | | | CCGCATGCTCGCAGGGGTTG′] |
| 2273 | NM_024915.3(GRHL2): | 79977 | GRHL2 | [′GATGATTCAGATTGACACATACAGTYATAA |
| | c.1192T > C (p.Tyr398His) | | | CAATCGTAGCAATAAACCCAT′] |
| 2274 | NM_002049.3(GATA1): c.2T > C | 2623 | GATA1 | [′CGCAGGTTAATCCCCAGAGGCTCCAYGGAG |
| | (p.Met1Thr) | | | TTCCCTGGCCTGGGGTCCCTG′] |
| 2275 | NM_002049.3(GATA1): | 2623 | GATA1 | [′TACTGTGGTGGCTCCGCTCAGCTCAYGAGGG |
| | c.1240T> C (p.Ter414Arg) | | | CACAGAGCATGGCCTCCAGA′] |
| 2276 | NM_005859.4(PURA): c.299T > C | 5813 | PURA | [′GGCGCGGGCGGCAACAAGAGCCGCCYTACT |
| | (p.Leu100Pro) | | | CTCTCCATGTCAGTGGCCGTG′] |
| 2277 | NM_032374.4(APOPT1): | 84334 | APOPT1 | [′TTCTGGGCAAACCAGAATTTGACTTYTAGTA |
| | c.353T > C (p.Phe118Ser) | | | AGGTAAGTTTAAGTTTTAGA′] |
| 2278 | NM_032551.4(KISS1R): c.937T > | 84634 | KISS1R | [′TAAGACCTGGGCTCACTGCATGTCCYACAGC |
| | C (p.Tyr313His) | | | AACTCCGCGCTGAACCCGCT′] |
| 2279 | NM_017696.2(MCM9): | 254394 | MCM9 | [′AAAGCTTGATACGATTAGCAGAAGGYCTAT |
| | c.1732 + 2T > C | | | TTCATTCAGCGAATGATGCTT′] |
| 2280 | NM_003159.2(CDKL5): c.602T > | 6792 | CDKL5 | [′GACATGTGGTCGGTGGGCTGTATTCYTGGGG |
| | C (p.Leu201Pro) | | | AGCTTAGCGATGGACAGCCT′] |
| 2281 | NM_005740.2(DNAL4): | 10126 | DNAL4 | [′GAGAAATTCTCCAACAACAACGAGGYATTG |
| | c.153 + 2T > C | | | CCAGCAGTGCAGGCGGCCCCT′] |
| 2282 | NM_201631.3(TGM5): c.763T > C | 9333 | TGM5 | [′TTCAGGATGGCCACGCTGCCCGTCCRCTCCG |
| | (p.Trp255Arg) | | | CAGGGTTGGCGCCGTCTGTG′] |
| 2283 | NM_201631.3(TGM5): c.122T > C | 9333 | TGM5 | [′GCTCCGGTTCCTGAAGTACAGGGTGRGGTTG |
| | (p.Leu41Pro) | | | AAGGCCTGGCCCCGGCGAAC′] |
| 2284 | NM_001287223.1(SCN11A): | 11280 | SCN11A | [′TACCTTCATTCCTTCAAACTGGGACRGCGCA |
| | c.3473T > C (p.Leu1158Pro) | | | CGAAGAGGCCTCAGTGCTCG′] |
| 2285 | NM_001287223.1(SCN11A): | 11280 | SCN11A | [′GGGCTCTACTCAGTCTTCTTCTTCAYTGTGG |
| | c.1142T > C (p.Ile381Thr) | | | TCATTTTCCTGGGCTCCTTC′] |
| 2286 | NM_001302946.1(TRNT1): | 51095 | TRNT1 | [′CATGATCCTGAGACTTTGGAAGCAAYTGCA |
| | c.668T > C (p.Ile223Thr) | | | GAAAATGCAAAAGGCTTGGCT′] |
| 2287 | NM_001302946.1(TRNT1): | 51095 | TRNT1 | [′TAATGAATAGGTTTTGATGGCACTTYATTTG |
| | c.497T > C (p.Leu166Ser) | | | ACTACTTTAATGGTTATGAA′] |
| 2288 | NM_018136.4(ASPM): | 259266 | ASPM | [′ATAGACACCTATGGAAAGATGTGGGYAAGA |
| | c.2419 + 2T > C | | | AGACTGCAGAAATCTTGACAT′] |
| 2289 | NM_022455.4(NSD1): c.5885T > | 64324 | NSD1 | [′TGGGGTCTACGGACAAAAACAGATAYTAAA |
| | C (p.Ile1962Thr) | | | AAGGTTAGAAAAAGCTAAATT′] |
| 2290 | NM_022455.4(NSD1): c.5989T > | 64324 | NSD1 | [′TCAAGAACATGATATCACTAATTTCYATATG |
| | C (p.Tyr1997His) | | | CTCACCCTAGACAAAGTAAG′] |
| 2291 | NM_133433.3(NIPBL): | 25836 | NIPBL | [′AAAAAATATGCTGGATTCATTCATGYATGTA |
| | c.7062 + 2T > C | | | TTTTAACATTTTATAACCTA′] |
| 2292 | NM_000525.3(KCNJ11): | 3767 | KCNJ11 | [′GGAGGACGGACGTTACTCTGTGGACYACTC |
| | c.988T > C (p.Tyr330His) | | | CAAGTTTGGCAACACCGTCAA′] |
| 2293 | NM_004004.5(GJB2): c.107T > C | 2706 | GJB2 | [′CTCTTCATTTTTCGCATTATGATCCYCGTTGT |
| | (p.Leu36Pro) | | | GGCTGCAAAGGAGGTGTGG′] |
| 2294 | NM_130838.1(UBE3A): | 7337 | UBE3A | [′CTTTAATGTGCTTTTACTTCCGGAAYACTCA |
| | c.2485T > C (p.Tyr829His) | | | AGCAAAGAAAAACTTAAAGA′] |
| 2295 | NM_005682.6(ADGRG1): | 9289 | ADGRG1 | [′GCCATCTTCCTGCACTTCTCCCTGCYCACCT |
| | c.1460T > C (p.Leu487Pro) | | | GCCTTTCCTGGATGGGCCTC′] |
| 2296 | NM_000430.3(PAFAH1B1): | 5048 | PAFAH1B1 | [′CCGAGAGCATGAGCATGTGGTAGAAYGCAT |
| | c.841T > C (p.Cys281Arg) | | | TTCCTGGGCTCCAGAAAGCTC′] |
| 2297 | NM_001005360.2(DNM2): | 1785 | DNM2 | [′GTGGACAGCTGGAAGGCCTCGTTCCYCCGA |
| | c.1862T > C (p.Leu621Pro) | | | GCTGGCGTCTACCCCGAGAAG′] |
| 2298 | NM_178151.2(DCX): c.683T > C | 1641 | DCX | [′CTGGAGACCGGGGTTGTCAAAAAACYCTAC |
| | (p.Leu228Pro) | | | ACTCTGGATGGAAAACAGGTA′] |
| 2299 | NM_178151.2(DCX): c.641T > C | 1641 | DCX | [′TCTTTTGAGCAAGTCCTCACTGATAYCACAG |
| | (p.Ile214Thr) | | | AAGCCATCAAACTGGAGACC′] |
| 2300 | NM_178151.2(DCX): c.412T > C | 1641 | DCX | [′AGACAACTTCTTTAAAAAGGTGGAGYACAC |
| | (p.Tyr138His) | | | CAAGAATGTCAATCCCAACTG′] |
| 2301 | NM_178151.2(DCX): c.272T > C | 1641 | DCX | [′TTGCTGGCTGACCTGACGCGATCTCYGTCTG |
| | (p.Leu91Pro) | | | ACAACATCAACCTGCCTCAG′] |
| 2302 | NM_178151.2(DCX): c.128T > C | 1641 | DCX | [′TGTAGCTTCTACCGAACCAGAACCTYGCAG |
| | (p.Leu43Ser) | | | GCACTGAGTAATGAGAAGAAA′] |
| 2303 | NM_178151.2(DCX): c.2T > C | 1641 | DCX | [′AGGTCTCTGAGGTTCCACCAAAATAYGGAA |
| | (p.Met1Thr) | | | CTTGATTTTGGACACTTTGAC′] |
| 2304 | NM_000252.2(MTM1): c.260T > | 4534 | MTM1 | [′TCTTCTCTAATACTTGATGTTCCTCYGGGTGT |
| | C (p.Leu87Pro) | | | GATCTCGAGAATTGAAAAA′] |
| 2305 | NM_000252.2(MTM1): c.683T > | 4534 | MTM1 | [′AACTTTCTGACTTAACCATAGGTGCYGTCAT |
| | C (p.Leu228Pro) | | | GGATTCATCCAGAAAATAAG′] |
| 2306 | NM_000252.2(MTM1): c.958T > | 4534 | MTM1 | [′TCATAATATTCATGTTATGCGGGAAYCTTTA |
| | C (p.Ser320Pro) | | | AAAAAAGTGAAGGACATTGT′] |
| 2307 | NM_000252.2(MTM1): | 4534 | MTM1 | [′TGTGTGTGGCAAATGTCAAAACAGGYAAGG |
| | c.1353 + 2T > C | | | AATATGAGGGATGAAAATACA′] |
| 2308 | NM_000252.2(MTM1): c.1367T > | 4534 | MTM1 | [′GTTTTTGTTTAGTTCCCTACAGCTTYTGAATT |
| | C (p.Phe456Ser) | | | CAATGAACAATTTTTGATT′] |
| 2309 | NM_000252.2(MTM1): c.1433T > | 4534 | MTM1 | [′CTGTATAGTTGCCGATTTGGTACTTYCTTATT |
| | C (p.Phe478Ser) | | | CAACTGTGAATCTGCTCGA′] |
| 2310 | NM_000252.2(MTM1): c.1495T > | 4534 | MTM1 | [′GGTTACAGAAAGGACTGTTTCTTTAYGGTCA |
| | C (p.Trp499Arg) | | | CTGATAAACAGTAATAAAGA′] |
| 2311 | NM_006579.2(EBP): c.310T > C | 10682 | EBP | [′TCTCTTCTTTTCTTCAGGGAAAGAGYATGCC |
| | (p.Tyr104His) | | | AAGGGAGACAGCCGATACAT′] |
| 2312 | NM_152296.4(ATP1A3): | 478 | ATP1A3 | [′GAGCCTGCCTGTGCCACAGGCCGCCYGATCT |
| | c.2270T > C (p.Leu757Pro) | | | TCGACAACCTAAAGAAGTCC′] |
| 2313 | NM_152296.4(ATP1A3): | 478 | ATP1A3 | [′GTGGCCCTGTCTCACATCGCTGGGCYCTGCA |
| | c.1250T > C (p.Leu417Pro) | | | ATCGCGCTGTCTTCAAGGGT′] |
| 2314 | NM_152296.4(ATP1A3): | 478 | ATP1A3 | [′GAACCGCATGACAGTCGCCCACATGYGGTT |
| | c.1144T > C (p.Trp382Arg) | | | TGACAACCAGATCCACGAGGC′] |
| 2315 | NM_152296.4(ATP1A3): | 478 | ATP1A3 | [′ATCTGCTCAGATAAGACAGGGACCCYCACT |
| | c.1112T > C (p.Leu371Pro) | | | CAGAACCGCATGACAGTCGCC′] |
| 2316 | NM_004963.3(GUCY2C): | −1 | — | [′CTTTCTGTCCTTCATTTCAGGTCCCYGTGCTG |
| | c.2782T > C (p.Cys928Arg) | | | CTGGAGTTGTGGGAATCAA′] |
| 2317 | NM_000109.3(DMD): c.1700T > | 1756 | DMD | [′GTTCACTGCATCTTCTTTTTCTGAARGCCATG |
| | C (p.Leu567Pro) | | | CACTAAAAAGGCACTGCAA′] |
| 2318 | NM_001543.4(NDST1): | 3340 | NDST1 | [′CAGCAACTACCCCAGCTCTGAGACCYTTGA |
| | c.1918T > C (p.Phe640Leu) | | | GGAGATCCAGTTTTTTAATGG′] |
| 2319 | NM_001999.3(FBN2): c.3740T > | 2201 | FBN2 | [′GGTGTCACAGCCTCCGTTCATTATCRTACAT |
| | C (p.Met1247Thr) | | | TCATCAATATCTGTGAAAAC′] |
| 2320 | NM_005154.4(USP8): c.2152T > | 9101 | USP8 | [′ACCTTCCAAACTGAAGCGCTCCTACYCCTCC |
| | C (p.Ser718Pro) | | | CCAGATATAACCCAGGCTAT′] |
| 2321 | NM_000734.3(CD247): c.2T > C | 919 | CD247 | [′CCTCTTTCTGAGGGAAAGGACAAGAYGAAG |
| | (p.Met1Thr) | | | TGGAAGGCGCTTTTCACCGCG′] |
| 2322 | NM_000663.4(ABAT): c.1433T > | 18 | ABAT | [′AAATCCATTCGTTTCCGTCCCACGCYGGTCT |
| | C (p.Leu478Pro) | | | TCAGGGATCACCACGCTCAC′] |
| 2323 | NM_005211.3(CSF1R): c.2717T > | 1436 | CSF1R | [′ACCCACAGACCCACCTTCCAGCAGAYCTGCT |
| | C (p.Ile906Thr) | | | CCTTCCTTCAGGAGCAGGCC′] |
| 2324 | NM_005211.3(CSF1R): c.2566T > | 1436 | CSFIR | [′CTTGGCCTTTGCAGGGCTGAATCCCYACCCT |
| | C (p.Tyr856His) | | | GGCATCCTGGTGAACAGCAA′] |
| 2325 | NM_005211.3(CSF1R): c.2480T > | 1436 | CSF1R | [′GTGAAGTGGATGGCCCCAGAGAGCAYCTTT |
| | C (p.Ile827Thr) | | | GACTGTGTCTACACGGTTCAG′] |
| 2326 | NM_005211.3(CSF1R): c.2450T > | 1436 | CSF1R | [′TGGGGACTGTCATCCCAGGCCCGCCYGCCTG |
| | C (p.Leu817Pro) | | | TGAAGTGGATGGCCCCAGAG′] |
| 2327 | NM_005211.3(CSF1R): c.1957T > | 1436 | CSF1R | [′GAACATCGTCAACCTTCTGGGAGCCYGTACC |
| | C (p.Cys653Arg) | | | CATGGAGGTAAGGGCCTTGG′] |
| 2328 | NM_005211.3(CSF1R): c.1745T > | 1436 | CSF1R | [′AAGTGGGAGTTCCCCCGGAACAACCYGCAG |
| | C (p.Leu582Pro) | | | TTTGGTGAGATGGCAGCTCAT′] |
| 2329 | NM_001563.3(IMPG1): c.461T > | 3617 | IMPG1 | [′AATTCCCAGGAGCACCTGGATCTTCYCCAGC |
| | C (p.Leu154Pro) | | | AGGTGAGCCTAAACACCACA′] |
| | NM_001130823.1(DNMT1): | 1786 | DNMT1 | [] |
| | c.1531T > C (p.Tyr511His) | | | |
| 2330 | NM_152515.4(CKAP2L): c.2T > C | 150468 | CKAP2L | [′AGCAGCGGTAGGCCCGGGCCCCACCRTGAC |
| | (p.Met1Thr) | | | TCTTCAGTGACAGTTTTTCTT′] |
| 2331 | NM_170707.3(LMNA): | 4000 | LMNA | [′GGCAACTCCAGCCCCCGAACCCAGGNGAGT |
| | c.1968 + 2T > C | | | TGTCTCTGCTTTGTCTCCAAA′] |
| 2332 | NM_153818.1(PEX10): c.890T > | 5192 | PEX10 | [′AGAAACCCCCTGTGCACCCTGTGCCYGGAG |
| | C (p.Leu297Pro) | | | GAGCGCAGGCACCCAACAGCC′] |
| 2333 | NM_153818.1(PEX10): c.2T > C | 5192 | PEX10 | [′TCGGGACCACCCGAACCCGCGGCCAYGGCC |
| | (p.Met1Thr) | | | CCGGCCGCCGCCAGCCCCCCG′] |
| 2334 | NM_014305.3(TGDS): c.700T > C | 23483 | TGDS | [′AATGCTTCTACAACATCAGTAGCATRAAGG |
| | (p.Tyr234His) | | | AAGTTTCTTGTTTGAAGCCCT′] |
| 2335 | NM_000256.3(MYBPC3): | 4607 | MYBPC3 | [′GTGAACCTTCTCATCCCTTTCCAGGYGGGAC |
| | c.2994 + 2T > C | | | TGGCCCCCTTCCCTGTCCCC′] |
| 2336 | NM_000256.3(MYBPC3): | 4607 | MYBPC3 | [′CTCATGTGCCCCCCCAGCCAGGCTCDCCCTG |
| | c.1624 + 2T > C | | | CACAATGAGCTCAGCCAGCG′] |
| 2337 | NM_000257.3(MYH7): c.2207T > | 4625 | MYH7 | [′GCGGCCATCCCTGAGGGACAGTTCAHTGAT |
| | C (p.Ile736Thr) | | | AGCAGGAAGGGGGCAGAGAAG′] |
| 2338 | NM_000138.4(FBN1): c.7754T > | 2200 | FBN1 | [′TGCCAGCATGGCTGCCAGAACATCAYTGGG |
| | C (p.Ile2585Thr) | | | GGCTACAGGTGCAGCTGCCCC′] |
| 2339 | NM_000371.3(TTR): c.190T > C | 7276 | TTR | [′GGCTGCTGATGACACCTGGGAGCCAYTTGC |
| | (p.Phe64Leu) | | | CTCTGGGTAAGTTGCCAAAGA′] |
| 2340 | NM_000126.3(ETFA): c.2T > C | 2108 | ETFA | [′GAGGTTGCGGCGGAAGCGGAGACCAYGTTC |
| | (p.Met1Thr) | | | CGAGCGGCGGCTCCGGGGCAG′] |
| 2341 | NM_006493.2(CLN5): c.2T > C | 1203 | CLN5 | [′GCGGGCCGGGCGCGGGGAGGTGTCAYGCGC |
| | (p.Met1Thr) | | | CGGAACCTGCGCTTGGGGCCA′] |
| 2342 | NM_000543.4(SMPD1): c.475T > | 6609 | SMPD1 | [′CTCAGTGCTGAGCCCATCTGAGGCCYGTGGC |
| | C (p.Cys159Arg) | | | CTGCTCCTGGGCTCCACCTG′] |
| 2343 | NM_000501.3(ELN): | 2006 | ELN | [′TTCCTGGAATTGGAGGCATCGCAGGYAACA |
| | c.889 + 2T > C | | | TCTGTCCCAGCAGGGGGCGGG′] |
| 2344 | NM_000169.2(GLA): c.758T > C | −1 | — | [′TGGACATCTTTTAACCAGGAGAGAAYTGTTG |
| | (p.Ile253Thr) | | | ATGTTGCTGGACCAGGGGGT′] |
| 2345 | NM_152743.3(BRAT1): c.176T > | 221927 | BRAT1 | [′GAGCACCCCTGCCTGGTGGAGCTGCYGTCCC |
| | C (p.Leu59Pro) | | | ATGTGCTGAAAGTCCAGGAC′] |
| 2346 | NM_000152.3(GAA): c.896T > C | 2548 | GAA | [′CTCTACGGGTCTCACCCTTTCTACCBGGCGC |
| | (p.Leu299Pro) | | | TGGAGGACGGCGGGTCGGCA′] |
| 2347 | NM_015384.4(NIPBL): c.7637T > | 25836 | NIPBL | [′AATGTGTCCCAGGGTATTTTATTACYTCTCA |
| | C (p.Leu2546Pro) | | | TGTTAAAACAACATTTGAAG′] |
| 2348 | NM_005641.3(TAF6): c.212T > C | 6878 | TAF6 | [′ATTCTTTAGCTTCAAGGCGTAGTCADTGTCA |
| | (p.Ile71Thr) | | | CTGGTGGTGAGCTTCTGCCG′] |
| 2349 | NM_170707.3(LMNA): c.710T > | 4000 | LMNA | [′ATTGACAATGGGAAGCAGCGTGAGTYTGAG |
| | C (p.Phe237Ser) | | | AGCCGGCTGGCGGATGCGCTG′] |
| 2350 | NM_000527.4(LDLR): c.1468T > | 3949 | LDLR | [′GGACTGGATCCACAGCAACATCTACYGGAC |
| | C (p.Trp490Arg) | | | CGACTCTGTCCTGGGCACTGT′] |
| 2351 | NM_000081.3(LYST): c.772T > C | 1130 | LYST | [′CATGAACAATTCTCCATTTGACTTAYGTCAT |
| | (p.Cys258Arg) | | | GTTTTGTTATCTTTATTAGA′] |
| 2352 | NM_000256.3(MYBPC3): | 4607 | MYBPC3 | [′CTTACAGGGCGAGGCACGGTGTGAGYGCCG |
| | c.3796T > C (p.Cys1266Arg) | | | CCTGGAGGTGCGAGGTGAGGA′] |
| 2353 | NM_000256.3(MYBPC3): | 4607 | MYBPC3 | [′TTCAGCAAGCAGGGAGTGTTGACTCYGGAG |
| | c.3713T > C (p.Leu1238Pro) | | | ATTAGAAAGCCCTGCCCCTTT′] |
| 2354 | NM_000256.3(MYBPC3): | 4607 | MYBPC3 | [′CAGAAAGCCGACAAGAAGACCATGGBGAGC |
| | c.3330 + 2T > C | | | CCAGGGTCTGGGGTCCCCACG′] |
| 2355 | NM_000256.3(MYBPC3): | 4607 | MYBPC3 | [′CGCAAAGGACCAGGCGGTGTTCAAAYGTGA |
| | c.1696T > C (p.Cys566Arg) | | | GGTCTCAGATGAGAATGTTCG′] |
| 2356 | NM_000256.3(MYBPC3): | 4607 | MYBPC3 | [′ATCGGAGGAGGGGGCGCAAGTCAAABGGTG |
| | c.1456T > C (p.Trp486Arg) | | | AGTTCCAGAAGCACGGGGCAT′] |
| 2357 | NM_000256.3(MYBPC3): | 4607 | MYBPC3 | [′TGCCCAGCCTGCCTTCACTGGCAGCYACCGC |
| | c.709T > C (p.Tyr237His) | | | TGTGAGGTGTCCACCAAGGA′] |
| 2358 | NM_000256.3(MYBPC3): | 4607 | MYBPC3 | [′GGAGCCCCCGATGACCCCATTGGCCYCTTCG |
| | c.467T > C (p.Leu156Pro) | | | TGATGCGGCCACAGGATGGC′] |
| 2359 | NM_000257.3(MYH7): c.2723T > | 4625 | MYH7 | [′GATGCTGAGGAGCGCTGTGATCAGCYGATC |
| | C (p.Leu908Pro) | | | AAAAACAAGATTCAGCTGGAG′] |
| 2360 | NM_000257.3(MYH7): c.2479T > | 4625 | MYH7 | [′TCGGGCCTTCATGGGGGTCAAGAATYGGCC |
| | C (p.Trp827Arg) | | | CTGGATGAAGCTCTACTTCAA′] |
| 2361 | NM_000257.3(MYH7): c.1400T > | 4625 | MYH7 | [′GTCCTGGACATCGCTGGCTTCGAGAYCTTCG |
| | C (p.Ile467Thr) | | | ATGTGAGTTGGGACCCCTGG′] |
| 2362 | NM_000257.3(MYH7): c.1048T > | 4625 | MYH7 | [′CACTTCAGAGGAGAAAAACTCCATGYATAA |
| | C (p.Tyr350His) | | | GCTGACAGGCGCCATCATGCA′] |
| 2363 | NM_000257.3(MYH7): c.730T > | 4625 | MYH7 | [′CGTCCGGAACGACAACTCCTCCCGCYTCGTG |
| | C (p.Phe244Leu) | | | AGTGGTCCCTGACCTTGGCC′] |
| 2364 | NM_005159.4(ACTC1): c.755T > | −1 | — | [′CTGCCTGATGGCCAAGTCATCACTAYTGGCA |
| | C (p.Ile252Thr) | | | ATGAGCGCTTCCGCTGTCCT′] |
| 2365 | NM_030662.3(MAP2K2): | 5605 | MAP2K2 | [′GCAGCAGAAGAAGCGGCTGGAAGCCNTTCT |
| | c.169T> C (p.Phe57Leu) | | | CACCCAGAAAGCCAAGGTCGG′] |
| 2366 | NM_000169.2(GLA): c.41T > C | −1 | — | [′CCAGAACTACATCTGGGCTGCGCGCYTGCG |
| | (p.Leu14Pro) | | | CTTCGCTTCCTGGCCCTCGTT′] |
| 2367 | NM_002294.2(LAMP2): | 3920 | LAMP2 | [′TATCTAGACTTTGTCTTTGCTGTGGYGAGTA |
| | c.864 + 2T > C | | | ACAGATTTTTTAAAGTTAGG′] |
| 2368 | NM_000551.3(VHL): c.227T > C | 7428 | VHL | [′TCGCGCGAGCCCTCCCAGGTCATCTYCTGCA |
| | (p.Phe76Ser) | | | ATCGCAGTCCGCGCGTCGTG′] |
| 2369 | NM_000551.3(VHL): c.266T > C | 7428 | VHL | [′CCGCGCGTCGTGCTGCCCGTATGGCHCAACT |
| | (p.Leu89Pro) | | | TCGACGGCGAGCCGCAGCCC′] |
| 2370 | NM_000551.3(VHL): c.473T > C | 7428 | VHL | [′GTTTTTGCCCTTCCAGTGTATACTCHGAAAG |
| | (p.Leu158Pro) | | | AGCGATGCCTCCAGGTTGTC′] |
| 2371 | NM_000051.3(ATM): | −1 | — | [′GCAGTGTAGCTACTTCTTCTATTGGYAATCT |
| | c.8584 + 2T > C | | | TCTTGTACATATAGTAGATT′] |
| 2372 | NM_058216.2(RAD51C): | 5889 | RAD51C | [′AGGTGTTGGAAAAACACAATTATGGYAAAA |
| | c.404 + 2T > C | | | TAAAGTGTTCTCCTTTTAAGG′] |
| 2373 | NM_000455.4(STK11): c.545T > | 6794 | STK11 | [′CACAAGGACATCAAGCCGGGGAACCYGCTG |
| | C (p.Leu182Pro) | | | CTCACCACCGGTGGCACCCTC′] |
| 2374 | NM_001199107.1(TBC1D24): | 57465 | TBC1D24 | [′GGACAACACGCAGGTGCCCAGCTACYGCCT |
| | c.313T > C (p.Cys105Arg) | | | GAATGCACGCGGCGAGGGGGC′] |
| 2375 | NM_000899.4(KITLG): c.98T > C | 4254 | KITLG | [′ACTGAAGGGATCTGCAGGAATCGTGYGACT |
| | (p.Val33Ala) | | | AATAATGTAAAAGACGTCACT′] |
| 2376 | NM_001195129.1(PRSS56): | 646960 | PRSS56 | [′GCAGTGCCTGCAGCGCCGGCGGCGAYGCGG |
| | c.1183T > C (p.Cys395Arg) | | | TCAGTTCTGTTCACCCGGACC′] |
| 2377 | NM_006888.4(CALM1): c.268T > | 801 | CALM1 | [′TAGTGAAGAAGAAATCCGTGAGGCAYTCCG |
| | C (p.Phe90Leu) | | | AGTCTTTGACAAGGTAATCCA′] |
| 2378 | NM_017534.5(MYH2): c.5609T > | −1 | — | [′GAAGATAGAAAGAATATTCTCAGGCYTCAA |
| | C (p.Leu1870Pro) | | | GATTTGGTAGATAAACTTCAG′] |
| 2379 | NM_003000.2(SDHB): c.574T > C | 6390 | SDHB | [′CTACGAGTGCATTCTCTGTGCCTGCYGTAGC |
| | (p.Cys192Arg) | | | ACCAGCTGCCCCAGCTACTG′] |
| 2380 | NM_000314.6(PTEN): c.406T > C | 5728 | PTEN | [′AAAGGGACGAACTGGTGTAATGATAYGTGC |
| | (p.Cys136Arg) | | | ATATTTATTACATCGGGGCAA′] |
| 2381 | NM_000051.3(ATM): c.2T > C | 472 | ATM | [′ATGTGTGTTCTGAAATTGTGAACCAYGAGTC |
| | (p.Met1Thr) | | | TAGTACTTAATGATCTGCTT′] |
| 2382 | NM_052867.2(NALCN): | 259232 | NALCN | [′GGTCCTGGAAAAAAGCTTGGGAGTTYGGTT |
| | c.1526T > C (p.Leu509Ser) | | | GTATTTACTGCCAGCCTCTTG′] |
| 2383 | NM_000314.6(PTEN): c.545T > C | 5728 | PTEN | [′TATGTGTATTATTATAGCTACCTGTYAAAGA |
| | (p.Leu182Ser) | | | ATCATCTGGATTATAGACCA′] |
| 2384 | NM_005957.4(MTHFR): | 4524 | MTHFR | [′ACGCAGGGCGTCAGGACGCAGGGTCRTGGA |
| | c.1969T > C (p.Ter657Arg) | | | GCCTCCGTTTCTCTCGCATTC′] |
| 2385 | NM_005957.4(MTHFR): | 4524 | MTHFR | [′AACCTGGTGGACAATGACTTCCCACYGGAC |
| | c.1883T > C (p.Leu628Pro) | | | AACTGCCTCTGGCAGGTGGTG′] |
| 2386 | NM_005957.4(MTHFR): | 4524 | MTHFR | [′CTGTGGATTGAGCGGTGGGGAAAGCYGTAT |
| | c.1793T > C (p.Leu598Pro) | | | GAGGAGGAGTCCCCGTCCCGC′] |
| 2387 | NM_005957.4(MTHFR): | 4524 | MTHFR | [′AGCGGGGGCTATGTCTTCCAGAAGGYGTGG |
| | c.1530 + 2T > C | | | TAGGGAGGCACGGGGTGCCCC′] |
| 2388 | NM_005957.4(MTHFR): c.388T > | 4524 | MTHFR | [′CCTGGAGACCATCCTGCACATGACCYGCTGC |
| | C (p.Cys130Arg) | | | CGTCAGCGCCTGGAGGAGAT′] |
| 2389 | NM_000264.3(PTCH1): | 5727 | PTCH1 | [′AACCCCTGGACGGCCGGGATCATTGYGAGT |
| | c.3168 + 2T > C | | | GTATTATAAGGGGCTTTGTGG′] |
| 2390 | NM_000030.2(AGXT): c.302T > C | 189 | AGXT | [′GTGCTGGAGCCTGGGGACTCCTTCCYGGTTG |
| | (p.Leu101Pro) | | | GGGCCAATGGCATTTGGGGG′] |
| 2391 | NM_000030.2(AGXT): c.322T > C | 189 | AGXT | [′CTTCCTGGTTGGGGCCAATGGCATTYGGGGG |
| | (p.Trp108Arg) | | | CAGCGAGCCGTGGACATCGG′] |
| 2392 | NM_000023.2(SGCA): c.371T > C | 6442 | SGCA | [′ACTCGGCAGAGGCTGGTGCTGGAGAYTGGG |
| | (p.Ile124Thr) | | | GACCCAGAAGGTACCTCTAGC′] |
| 2393 | NM_016035.4(COQ4): c.155T > C | 51117 | COQ4 | [′CGCCATCGCCGCGGAGCCGGCGGCCRACAG |
| | (p.Leu52Ser) | | | CCCTTTCTGCAGCGGGGAGGT′] |
| 2394 | NM_000510.2(FSHB): c.298T > C | 2488 | FSHB | [′GTATACATACCCAGTGGCCACCCAGYGTCA |
| | (p.Cys100Arg) | | | CTGTGGCAAGTGTGACAGCGA′] |
| 2395 | NM_007374.2(SIX6): c.110T > C | 4990 | SIX6 | [′CGCCTGGGTCGCTTCCTCTGGTCGCYGCCCG |
| | (p.Leu37Pro) | | | TGGCCCCTGCGGCCTGCGAG′] |
| 2396 | NM_000314.6(PTEN): c.202T > C | 5728 | PTEN | [′AAAGCATAAAAACCATTACAAGATAHACAA |
| | (p.Tyr68His) | | | TCTGTAAGTATGTTTTCTTAT′] |
| 2397 | NM_001103.3(ACTN2): c.683T > | 88 | ACTN2 | [′GAGAAGCACCTGGATATTCCTAAAAYGTTG |
| | C (p.Met228Thr) | | | GATGCTGAAGGTGAGATGAAA′] |
| 2398 | NM_005249.4(FOXG1): c.700T > | 2290 | FOXG1 | [′GCAGAACTCCATCCGCCACAATCTGYCCCTC |
| | C (p.Ser234Pro) | | | AACAAGTGCTTCGTGAAGGT′] |
| 2399 | NM_001165963.1(SCN1A): | −1 | — | [′ATTCCATCCATCATGAATGTGCTTCYGGTTT |
| | c.4055T > C (p.Leul352Pro) | | | GTCTTATATTCTGGCTAATT′] |
| 2400 | NM_001165963.1(SCN1A): | 6323 | SCN1A | [′GCTCTGGGAAATTTAACCCTCGTCTYGGCCA |
| | c.2690T > C (p.Leu897Ser) | | | TCATCGTCTTCATTTTTGCC′] |
| 2401 | NM_001165963.1(SCN1A): | 6323 | SCN1A | [′CTAATAAATTTGATCCTGGCTGTGGHGGCCA |
| | c.1265T > C (p.Val422Ala) | | | TGGCCTACGAGGAACAGAAT′] |
| 2402 | NM_001165963.1(SCN1A): | 6323 | SCN1A | [′TTTCTTTTACCCCACTTGCAGCCAAYGTCCA |
| | c.1033T > C (p.Cys345Arg) | | | GAGGGATATATGTGTGTGAA′] |
| 2403 | NM_001165963.1(SCN1A): | 6323 | SCN1A | [′AGATGTAATGATCCTGACTGTGTTCYGTCTG |
| | c.769T > C (p.Cys257Arg) | | | AGCGTATTTGCTCTAATTGG′] |
| 2404 | NM_001165963.1(SCN1A): | 6323 | SCN1A | [′TTCCGGTTCAGTGCCACCTCTGCCCYGTACA |
| | c.323T > C (p.Leu108Pro) | | | TTTTAACTCCCTTCAATCCT′] |
| 2405 | NM_000426.3(LAMA2): | 3908 | LAMA2 | [′GCAGAATCAGAACCAGCTCTTTTGAYAGGG |
| | c.8282T > C (p.Ile2761Thr) | | | AGCAAGCAGTTCGGGCTTTCA′] |
| 2406 | NM_001199.3(BMP1): | 649 | BMP1 | [′GTCTGTGACATTTCCTGTTGTGAAGYAAAAG |
| | c.*241T > C | | | AGGGACCCCTGCGTCCTGCT′] |
| 2407 | NM_001987.4(ETV6): c.1046T > | 2120 | ETV6 | [′CTTTGGGATTACGTCTATCAGTTGCYTTCTG |
| | C (p.Leu349Pro) | | | ACAGCCGGTACGAAAACTTC′] |
| 2408 | NM_004974.3(KCNA2): c.788T > | 3737 | KCNA2 | [′ATGAACATCATTGACATTGTGGCCAYCATCC |
| | C (p.Ile263Thr) | | | CCTACTTCATCACCCTGGGG′] |
| 2409 | NM_002055.4(GFAP): c.791T > C | 2670 | GFAP | [′GTGTCCCCCACCTAGTTTGCAGACCYGACAG |
| | (p.Leu264Pro) | | | ACGCTGCTGCCCGCAACGCG′] |
| 2410 | NM_002055.4(GFAP): c.239T > C | 2670 | GFAP | [′GAGATGATGGAGCTCAATGACCGCTYTGCC |
| | (p.Phe80Ser) | | | AGCTACATCGAGAAGGTTCGC′] |
| 2411 | NM_002055.4(GFAP): c.218T > C | 2670 | GFAP | [′ACCCGGGCCAGTGAGCGGGCAGAGADGATG |
| | (p.Met73Thr) | | | GAGCTCAATGACCGCTTTGCC′] |
| 2412 | NM_001288953.1(TTC7A): c.191 | 57217 | TTC7A | [′TTTGCCTGATGCCCATGATGCAGACYCTGGT |
| | 2T > C (p.Ser638Pro) | | | AAGAACGAGCTCCTTGGGCC′] |
| 2413 | NM_000257.3(MYH7): c.5117T > | −1 | — | [′TCCCGGAAGCTGGCGGAGCAGGAGCYGATT |
| | C (p.Leu1706Pro) | | | GAGACTAGTGAGCGGGTGCAG′] |
| 2414 | NM_000257.3(MYH7): c.4772T > | −1 | — | [′ATGGAACAGGCCAAGCGCAACCACCWGCG |
| | C (p.Leu1591Pro) | | | GGTGGTGGACTCGCTGCAGACC′] |
| 2415 | NM_016218.2(POLK): c.609T > C | 51426 | POLK | [′TGAGTCTTGATGAAGCCTACTTGAAYATAAC |
| | (p.Asn203=) | | | AAAGCACTTAGAAGAAAGAC′] |
| 2416 | NM_016218.2(POLK): c.*66T > C | 51426 | POLK | [′TATTTTATAATCAATGAATTTGTTCYTTCTGA |
| | | | | TTTTAAGTTTGCAGATTTA′] |
| 2417 | NM_015662.2(IFT172): c.770T > | 26160 | IFT172 | [′AGTCCTGGGGGCCAGTCTGTTGTGCYAGGA |
| | C (p.Leu257Pro) | | | AGTTATGACAGGTAAGTCCCC′] |
| 2418 | NM_178454.4(DRAM2): c.79T > | 128338 | DRAM2 | [′GACATCTGCTGCTTTCATATTTTCAYACATT |
| | C (p.Tyr27His) | | | ACTGCAGTAACACTCCACCA′] |
| 2419 | NM_032790.3(ORAI1): c.581T > | 84876 | ORAI1 | [′CTCTTCCTAGCTGAGGTGGTGCTGCYCTGCT |
| | C (p.Leu194Pro) | | | GGGTCAAGTTCTTGCCCCTC′] |
| 2420 | NM_001135669.1(XPR1): | 9213 | XPR1 | [′GAGTTCTACCTCAGTCTAATCCTGCYGCAGA |
| | c.434T > C (p.Leu145Pro) | | | ACTATCAGGTACTTAGATTC′] |
| 2421 | NM_001135669.1(XPR1): | 9213 | XPR1 | [′AAACTGGCCTTCAGTGAGTTCTACCYCAGTC |
| | c.419T > C (p.Leu140Pro) | | | TAATCCTGCTGCAGAACTAT′] |
| 2422 | NM_001135669.1(XPR1): | 9213 | XPR1 | [′GACAGACAAAAGGCTATGAAGCGTTYACGT |
| | c.653T > C (p.Leu218Ser) | | | GTCCCCCCTTTGGGAGCTGCT′] |
| 2423 | NM_005859.4(PURA): c.218T > C | 5813 | PURA | [′CGGGTGGACATCCAGAACAAGCGCTYCTAC |
| | (p.Phe73Ser) | | | CTGGACGTGAAGCAGAACGCC′] |
| 2424 | NM_005859.4(PURA): c.563T > C | 5813 | PURA | [′CTGGGCTCCACGCAGGGCCAGACCAYTGCG |
| | (p.Ile188Thr) | | | CTGCCCGCGCAGGGGCTCATC′] |
| 2425 | NM_001399.4(EDA): | 1896 | EDA | [′TCTGACTCCCAGGACGGGCACCAGGKGAGT |
| | c.396 + 2T > C | | | CACCTAGTAGGGGCGGCGGCG′] |
| 2426 | NM_001848.2(COL6A1): | 1291 | COL6A1 | [′TCCAGGGGACCCAAGGGCTACAAGGYGAGC |
| | c.957 + 2T > C | | | GTGGGCTGCTGGGAGGGGGGA′] |
| 2427 | NM_000454.4(SOD1): c.341T > C | 6647 | SOD1 | [′TCACTCTCAGGAGACCATTGCATCAYTGGCC |
| | (p.Ile114Thr) | | | GCACACTGGTGGTAAGTTTT′] |
| 2428 | NM_020451.2(SEPN1): | 57190 | SEPN1 | [′CTTCTACTACACTGTGATGTTCCGGYGAGTG |
| | c.872 + 2T > C | | | GGCCACACTGGCTGGCCTGG′] |
| 2429 | NM_004453.3(ETFDH): | 2110 | ETFDH | [′GGTCTAGACTATCAGAATCCATACCYGAGTC |
| | c.1001T > C (p.Leu334Pro) | | | CATTTAGAGAGTTCCAAAGG′] |
| 2430 | NM_198056.2(SCN5A): | 6331 | SCN5A | [′CAGCTGTGGACTCCAGGGGGGTAGGYTGCC |
| | c.4299 + 6T > C | | | ACAGTGGCTTCTTCCACCAAG′] |
| 2431 | NM_198056.2(SCN5A): | 6331 | SCN5A | [′TTCACAGGGATTTTCACAGCAGAGABGACCT |
| | c.2291T > C (p.Met764Thr) | | | TCAAGATCATTGCCCTCGAC′] |
| 2432 | NM_198056.2(SCN5A): | 6331 | SCN5A | [′AGAGTTAGAGGAGTCTCGCCACAAGBGTCC |
| | c.2047T > C (p.Cys683Arg) | | | ACCATGCTGGAACCGTCTCGC′] |
| 2433 | NM_004415.2(DSP): c.4961T > C | 1832 | DSP | [′GAAAAGCAGAGGACCCAGGAAGAGCYGAG |
| | (p.Leu1654Pro) | | | GAGGCTCTCTTCTGAGGTCGAG′] |
| 2434 | NM_000238.3(KCNH2): | 3757 | KCNH2 | [′CGGGGCGACGTCGTCGTGGCCATCCYGGGT |
| | c.2396T > C (p.Leu799Pro) | | | ATGGGGTGGGGGGCGGGCACT′] |
| 2435 | NM_000238.3(KCNH2): | 3757 | KCNH2 | [′TTCATCTCCCGGGGCTCCATCGAGAYCCTGC |
| | c.2366T > C (p.Ile789Thr) | | | GGGGCGACGTCGTCGTGGCC′] |
| 2436 | NM_000238.3(KCNH2): | 3757 | KCNH2 | [′CTGCGTCATGCTCATTGGCTGTGAGYGTGCC |
| | c.1945 + 6T > C | | | CAGGGGCGGGCGGCGGGGAG′] |
| 2437 | NM_000238.3(KCNH2): | 3757 | KCNH2 | [′TCCCAACACCAACTCAGAGAAGATCBTCTCC |
| | c.1918T > C (p.Phe640Leu) | | | ATCTGCGTCATGCTCATTGG′] |
| 2438 | NM_000238.3(KCNH2): | 3757 | KCNH2 | [′CTACACGGCTGTCTTCACACCCTACYCGGCT |
| | c.1282T > C (p.Ser428Pro) | | | GCCTTCCTGCTGAAGGAGAC′] |
| 2439 | NM_000238.3(KCNH2): c.125T > | 3757 | KCNH2 | [′GCTCGGGTGGAGAACTGCGCCGTCAHCTAC |
| | C (p.Ile42Thr) | | | TGCAACGACGGCTTCTGCGAG′] |
| 2440 | NM_000218.2(KCNQ1): | 3784 | KCNQ1 | [′GTCTTTGCCATCTCCTTCTTTGCGCYCCCAGC |
| | c.1025T > C (p.Leu342Pro) | | | GGTAGGTGCCCCGTGGGTG′] |
| 2441 | NM_000218.2(KCNQ1): | 3784 | KCNQ1 | [′CCCAAACCCAAGAAGTCTGTGGTGGYGAGT |
| | c.1251 + 2T > C | | | AGCCCACCTGCCACCAGGGCA′] |
| 2442 | NM_130799.2(MEN1): c.547T > C | 4221 | MEN1 | [′CCTCGCCCTGTCTGAGGATCATGCCYGGGTA |
| | (p.Trp183Arg) | | | GTGTTTGGGCCCAATGGGGA′] |
| 2443 | NM_000138.4(FBN1): c.7531T > | 2200 | FBN1 | [′CACCATTGGCGGCTTCACATGCAAAYGTCCT |
| | C (p.Cys2511Arg) | | | CCCGGATTTACCCAACACCA′] |
| 2444 | NM_000138.4(FBN1): c.7111T > | 2200 | FBN1 | [′ATGCTGCTGTGACGGAGGGAGAGGCYGGGG |
| | C (p.Trp2371Arg) | | | TCCCCACTGTGAGATCTGCCC′] |
| 2445 | NM_000138.4(FBN1): c.6274T > | 2200 | FBN1 | [′CTGCTGTGCCTTGAAGGGAGAAGGCYGGGG |
| | C (p.Trp2092Arg) | | | AGACCCCTGCGAGCTCTGCCC′] |
| 2446 | NM_000138.4(FBN1): c.5746T > | 2200 | FBN1 | [′CACAATTGGTTCCTTCAACTGCCGCYGCAAT |
| | C (p.Cys1916Arg) | | | CATGGTTTCATCCTTTCTCA′] |
| 2447 | NM_000138.4(FBN1): c.5726T > | 2200 | FBN1 | [′GGGAATGGAACTTGCCGGAACACAAYTGGT |
| | C (p.Ile1909Thr) | | | TCCTTCAACTGCCGCTGCAAT′] |
| 2448 | NM_000138.4(FBN1): c.1468 + 2T | 2200 | FBN1 | [′TGGACCTCCGTGGGGAGTGTATTGGYACGT |
| | > C | | | GATCCATCCTAGGTTGGCACC′] |
| 2449 | NM_004572.3(PKP2): c.2386T > | 5318 | PKP2 | [′TCTCATTGAAACTACAGCCTCTGCCYGTTAC |
| | C (p.Cys796Arg) | | | ACATTGAACAACATAATCCA′] |
| 2450 | NM_004333.4(BRAF): c.1783T > | 673 | BRAF | [′AGACCTCACAGTAAAAATAGGTGATYTTGG |
| | C (p.Phe595Leu) | | | TCTAGCTACAGTGAAATCTCG′] |
| 2451 | NM_000543.4(SMPD1): c.416T > | 6609 | SMPD1 | [′GCCGTGTGCCAATCCATTGTCCACCYCTTTG |
| | C (p.Leu139Pro) | | | AGGATGACATGGTGGAGGTG′] |
| 2452 | NM_000016.5(ACADM): | 34 | ACADM | [′GAAGCAGATACCCCAGGAATTCAGAHTGGG |
| | c.698T > C (p.Ile233Thr) | | | AGAAAGGTAAAGTATTTATTA′] |
| 2453 | NM_004453.3(ETFDH): | 2110 | ETFDH | [′AGGAGGACCTGCTTACAATGGAATGYAAAC |
| | c.1852T > C (p.Ter618Gln) | | | TGCAGCTAGCCAGTTTCTTTC′] |
| 2454 | NM_000255.3(MUT): c.842T > C | 4594 | MUT | [′GCCATTCTGGAGCTGGCCTATACTTYAGCAG |
| | (p.Leu281Ser) | | | ATGGATTGGAGTACTCTAGA′] |
| 2455 | NM_000277.1(PAH): c.2T > C | 5053 | PAH | [′AGACCTCACTCCCGGGGAGCCAGCABGTCC |
| | (p.Met1Thr) | | | ACTGCGGTCCTGGAAAACCCA′] |
| 2456 | NM_000017.3(ACADS): | 35 | ACADS | [′GGCAGCCATGGCCAAGCTGGCCGCCYCGGA |
| | c.1057T > C (p.Ser353Pro) | | | GGCCGCGACCGCCATCAGCCA′] |
| 2457 | NM_002225.3(IVD): | 3712 | IVD | [′GCGTATTGGGCATCACAGCCCCTGGYGAGT |
| | c.295 + 2T > C | | | ATAGTGTCTTTCCCTAAAAAG′] |
| 2458 | NM_000030.2(AGXT): c.2T > C | 189 | AGXT | [′CGAGCGGCAGGTTGGGTGCGGACCAYGGCC |
| | (p.Met1Thr) | | | TCTCACAAGCTGCTGGTGACC′] |
| 2459 | NM_000030.2(AGXT): c.77T > C | 189 | AGXT | [′CTCTCCATCCCCAACCAGCTCCTGCYGGGGC |
| | (p.Leu26Pro) | | | CTGGTCCTTCCAACCTGCCT′] |
| 2460 | NM_000030.2(AGXT): c.449T > C | 189 | AGXT | [′GGCCTGGCCCAGCACAAGCCAGTGCYGCTG |
| | (p.Leu150Pro) | | | TTCTTAACCCACGGGGAGTCG′] |
| 2461 | NM_000030.2(AGXT): c.497T > C | 189 | AGXT | [′TCGTCCACCGGCGTGCTGCAGCCCCHTGATG |
| | (p.Leu166Pro) | | | GCTTCGGGGAACTCTGCCAC′] |
| 2462 | NM_000030.2(AGXT): c.661T > C | 189 | AGXT | [′CGCCCCTCCAGGGACCTCGCTCATCYCCTTC |
| | (p.Ser221Pro) | | | AGTGACAAGGCCAAGTGAGT′] |
| 2463 | NM_000030.2(AGXT): c.757T > C | 189 | AGXT | [′CAAGTGGCTGGCCAACTTCTGGGGCYGTGA |
| | (p.Cys253Arg) | | | CGACCAGCCCAGGATGTGAGG′] |
| 2464 | NM_000030.2(AGXT): c.806T > C | 189 | AGXT | [′CATCACACAATCCCCGTCATCAGCCYGTACA |
| | (p.Leu269Pro) | | | GCCTGAGAGAGAGCCTGGCC′] |
| 2465 | NM_000030.2(AGXT): c.851T > C | 189 | AGXT | [′CCAGCGCCATCTCCCACACAGGGCCYGGAG |
| | (p.Leu284Pro) | | | AACAGCTGGCGCCAGCACCGC′] |
| 2466 | NM_000030.2(AGXT): c.893T > C | 189 | AGXT | [′CAGCACCGCGAGGCCGCGGCGTATCYGCAT |
| | (p.Leu298Pro) | | | GGGCGCCTGCAGGCACTGGGG′] |
| 2467 | NM_000030.2(AGXT): c.947T > C | 189 | AGXT | [′TGAGCCAGGCCCCTCCTGCAGGCGCYCCGG |
| | (p.Leu316Pro) | | | CTTCCCACAGTCACCACTGTG′] |
| 2468 | NM_000030.2(AGXT): c.1076T > | 189 | AGXT | [′AGCCCGCCCTGTGCCCCCCAGGTGCYGCGG |
| | C (p.Leu359Pro) | | | ATCGGCCTGCTGGGCTGCAAT′] |
| 2469 | NM_000030.2(AGXT): c.1151T > | 189 | AGXT | [′GTGACGGAGGCCCTGAGGGCGGCCCYGCAG |
| | C (p.Leu384Pro) | | | CACTGCCCCAAGAAGAAGCTG′] |
| 2470 | NM_012203.1(GRHPR): c.203T > | 9380 | GRHPR | [′TCCGACCACGTGGACAAGAGGATCCYGGAT |
| | C (p.Leu68Pro) | | | GCTGCAGGTGCACACTGGGTG′] |
| 2471 | NM_012203.1(GRHPR): c.965T > | 9380 | GRHPR | [′CTGGCTGGCCTGAGAGGGGAGCCGABGCCT |
| | C (p.Met322Thr) | | | AGTGAACTCAAGCTGTAGCCA′] |
| 2472 | NM_138413.3(HOGA1): c.533T > | 112817 | HOGA1 | [′GTCCCAGCCAACACAGGGCTGGACCYGCCT |
| | C (p.Leu178Pro) | | | GTGGATGCAGTGGTCACGCTT′] |
| 2473 | NM_138413.3(HOGA1): c.875T > | 112817 | HOGA1 | [′GGGATCCCAGGGCTGAAGAAAATCAYGGAC |
| | C (p.Met292Thr) | | | TGGTTTGGCTACTATGGAGGC′] |
| 2474 | NM_004370.5(COL12A1): | 1303 | COL12A1 | [′TTCTTGACTGATGCCTCCTGGAGCAYTGGGG |
| | 1c.700T > C (p.Ile2334Thr) | | | ACGATAATTTTAACAAAGTT′] |
| 2475 | NM_019074.3(DLL4): c.583T > C | 54567 | DLL4 | [′CCTGTGCAAGAAGCGCAATGACCACYTCGG |
| | (p.Phe195Leu) | | | CCACTATGTGTGCCAGCCAGA′] |
| 2476 | NM_019074.3(DLL4): c.1168T > | 54567 | DLL4 | [′CCAGGGGGCCAACTATGCTTGTGAAYGTCC |
| | C (p.Cys390Arg) | | | CCCCAACTTCACCGGCTCCAA′] |
| 2477 | NM_015909.3(NBAS): c.3164T > | 51594 | NBAS | [′TCAGAGCTTTTGGAAAAACATGGACYCGAG |
| | C (p.Leu1055Pro) | | | AAACCAATTTCATTTGTTAAA′] |
| 2478 | NM_000263.3(NAGLU): | 4669 | NAGLU | [′GCCTCCTTCCAGGGCCAGCCCTTCAYCTGGT |
| | c.1208T > C (p.Ile403Thr) | | | GCATGCTGCACAACTTTGGG′] |
| 2479 | NM_203290.2(POLRIC): | 9533 | POLRIC | [′TCTACAGTTTCGTCTCCAGGTCAGAYGCACT |
| | c.436T > C (p.Cys146Arg) | | | CGGAACCCCCATGCTGCTAA′] |
| 2480 | NM_018359.3(UFSP2): c.868T > | −1 | — | [′CCAGGGCATATATGGCTATCATCATYATATG |
| | C (p.Tyr290His) | | | CAGGATCGCATAGATGACAA′] |
| 2481 | NM_000310.3(PPT1): c.2T > C | 5538 | PPT1 | [′CCGCGGTCATGTGACACAGCGAAGAYGGCG |
| | (p.Met1Thr) | | | TCGCCCGGCTGCCTGTGGCTC′] |
| 2482 | NM_021007.2(SCN2A): | 6326 | SCN2A | [′CTAATAAATTTGATCTTGGCTGTGGYGGCCA |
| | c.1271T > C (p. Val424Ala) | | | TGGCCTATGAGGAACAGAAT′] |
| 2483 | NM_021007.2(SCN2A): | 6326 | SCN2A | [′GTTGACCTGGCCATCACCATCTGCAYTGTCT |
| | c.2306T > C (p.Ile769Thr) | | | TAAATACACTCTTCATGGCT′] |
| 2484 | NM_021007.2(SCN2A): | 6326 | SCN2A | [′TATGCAGCTGTTGATTCACGAAATGYAAGTC |
| | c.4308 + 2T > C | | | TAGTTAGAGGGAAATTGTTT′] |
| 2485 | NM_021007.2(SCN2A): | 6326 | SCN2A | [′TGGATTAATCTGGTGTTTATTGTTCYGTTCA |
| | c.4718T > C (p.Leu1573Pro) | | | CTGGAGAATGTGTGCTGAAA′] |
| 2486 | NM_001165963.1(SCN1A): | −1 | — | [′CAGCTCATTGCCATGGATTTGCCCAHGGTGA |
| | c.5567T > C (p.Met1856Thr) | | | GTGGTGACCGGATCCACTGT′] |
| 2487 | NM_001165963.1(SCN1A): | 6323 | SCN1A | [′AATCCCAATTATGGCTACACAAGCTYTGATA |
| | c.1094T > C (p.Phe365Ser) | | | CCTTCAGTTGGGCTTTTTTG′] |
| 2488 | NM_001165963.1(SCN1A): | 6323 | SCN1A | [′TCGGCATTGAGAACATTCAGAGTTCYCCGA |
| | c.662T > C (p.Leu221Pro) | | | GCATTGAAGACGATTTCAGTC′] |
| 2489 | NM_000806.5(GABRA1): | 2554 | GABRA1 | [′ATTCAAACATACCTGCCATGCATAAYGACA |
| | c.788T > C (p.Met263Thr) | | | GTGATTCTCTCACAAGTCTCC′] |
| 2490 | NM_014191.3(SCN8A): | 6334 | SCN8A | [′GCCCGTATTGGGCGCATCTTGCGTCYGATCA |
| | c.4889T > C (p.Leu1630Pro) | | | AAGGCGCCAAAGGGATTCGT′] |
| 2491 | NM_005249.4(FOXG1): c.673T > | 2290 | FOXG1 | [′TTACTACCGCGAGAACAAGCAGGGCYGGCA |
| | C (p.Trp225Arg) | | | GAACTCCATCCGCCACAATCT′] |
| 2492 | NM_017882.2(CLN6): | 54982 | CLN6 | [′AAGAATCTCAAGCCGGAGACGCTGGYGAGG |
| | c.486 + 2T > C | | | CCACCTCCTGCTCCCTGCCTG′] |
| 2493 | NM_002693.2(POLG): c.1808T > | 5428 | POLG | [′AGGGAAGCCATCCCAGGTAAGTGCCRTGAG |
| | C (p.Met603Thr) | | | TTTAGGTGTGACCCGCATCTG′] |
| 2494 | NM_002693.2(POLG): c.1283T > | 5428 | POLG | [′AGGCAGGTAGGAGACACCCATCTCCRGCAT |
| | C (p.Leu428Pro) | | | GCCGGCCAGAGTCACTGGGTG′] |
| 2495 | NM_018129.3(PNPO): c.2T > C | 55163 | PNPO | [′GGGTCACGTGGCCGGCGGCCCCCCAYGACG |
| | (p.Met1Thr) | | | TGCTGGCTGCGGGGCGTCACG′] |
| 2496 | NM_007254.3(PNKP): | 11284 | PNKP | [′ACCCCCACCCCCGCCCCAGGGCCTCRCCGGA |
| | c.1029 + 2T > C | | | TCAAAGGCTGGGAGCTCGAA′] |
| 2497 | NM_172107.2(KCNQ2): c.583T > | 3785 | KCNQ2 | [′CTCCCAGGGCAACGTCTTTGCCACAYCTGCG |
| | C (p.Ser195Pro) | | | CTCCGGAGCCTGCGCTTCCT′] |
| 2498 | NM_000026.2(ADSL): c.340T > C | 158 | ADSL | [′TATTCACCTTGGTGCTACTTCTTGCYATGTTG |
| | (p.Tyr114His) | | | GAGACAATACTGTAGGCGC′] |
| 2499 | NM_000026.2(ADSL): c.1339T > | 158 | ADSL | [′CCAGTTGGATCATTTACTGGATCCTYCTTCT |
| | C (p.Ser447Pro) | | | TTCACTGGTCGTGCCTCCCA′] |
| 2500 | NM_001356.4(DDX3X): c.704T > | 1654 | DDX3X | [′GGGTCTGGAAAAACTGCAGCATTTCYGTTGC |
| | C (p.Leu235Pro) | | | CCATCTTGAGTCAGATTTAT′] |
| 2501 | NM_001356.4(DDX3X): | 1654 | DDX3X | [′TAAAAATTTTTTTTCTTTCAGATGCYGGCTC |
| | c.1175T > C (p.Leu392Pro) | | | GTGATTTCTTAGATGAATAT′] |
| 2502 | NM_001356.4(DDX3X): | 1654 | DDX3X | [′GACATTTCAAATGTGAAACATGTTAYCAATT |
| | c.1541T > C (p.Ile514Thr) | | | TTGACTTGCCAAGTGATATT′] |
| 2503 | NM_020533.2(MCOLN1): | 57192 | MCOLN1 | [′ACCATCGCCTTCCGACACCTCTTCCYGCTGG |
| | c.317T > C (p.Leu106Pro) | | | GCTACTCGGACGGAGCGGAT′] |
| 2504 | NM_020533.2(MCOLN1): | 57192 | MCOLNI | [′TACTGCTTCTGTGGCTGGATCGTGCYGGGGC |
| | c.1340T > C (p.Leu447Pro) | | | CCTATCATGTGAAGGTACAT′] |
| 2505 | NM_000083.2(CLCN1): | 1180 | CLCN1 | [′CCCCGCGAAGCCATCAGTACTTTGTYTGACA |
| | c.1283T > C (p.Phe428Ser) | | | ACAATACATGGGTGAAACAC′] |
| 2506 | NM_003995.3(NPR2): c.226T > C | 4882 | NPR2 | [′CAGCTCCGAACTGGAAGGCGCCTGCYCTGA |
| | (p.Ser76Pro) | | | GTACCTGGCACCGCTGAGCGC′] |
| 2507 | NM_004700.3(KCNQ4): c.808T > | 9132 | KCNQ4 | [′GGACGCCAACTCCGACTTCTCCTCCYACGCC |
| | C (p.Tyr270His) | | | GACTCGCTCTGGTGGGGGAC′] |
| 2508 | NM_004700.3(KCNQ4): c.823T > | 9132 | KCNQ4 | [′CTTCTCCTCCTACGCCGACTCGCTCYGGTGG |
| | C (p.Trp275Arg) | | | GGGACGGTGCGTGAGGGTCT′] |
| 2509 | NM_005097.3(LGI1): c.124T > C | 9211 | LGI1 | [′GGGGAAGAAACCAGCGAAGCCAAAABGCCC |
| | (p.Cys42Arg) | | | TGCCGTGTGTACTTGTACCAA′] |
| 2510 | NM_005572.3(LMNA): | 4000 | LMNA | [′CAGCTCAGCCAGCTCCAGAAGCAGGYGATA |
| | c.936 + 2T > C | | | CCCCACCTCACCCCTCTCTCC′] |
| 2511 | NM_006009.3(TUBA1A): | 7846 | TUBA1A | [′AAACGTGCCTTTGTTCACTGGTACGYTGGGG |
| | c.1226T > C (p. Val409Ala) | | | AGGGGATGGAGGAAGGTGAG′] |
| 2512 | NM_001081550.1(THOC2): | 57187 | THOC2 | [′GACGTGTTCAATATGTTCTGTTACCYTGGTC |
| | c.1313T > C (p.Leu438Pro) | | | CTCACCTTTCTCACGATCCC′] |
| 2513 | NM_001081550.1(THOC2): | 57187 | THOC2 | [′ACATCAACAGAAAACTCCAAATTTTYCCAC |
| | c.3034T > C (p.Ser1012Pro) | | | ACTTCTTTGCTATGATCGAGT′] |
| 2514 | NM_001081550.1(THOC2): | 57187 | THOC2 | [′GATTATATAAAGCGAGTGCCTTCAAYTGATG |
| | c.2399T > C (p.Ile800Thr) | | | TACTCTGTAATGAATTTCAT′] |
| 2515 | NM_001356.4(DDX3X): | 1654 | DDX3X | [′CAGGTAGCAGCAAGAGGACTGGACAYTTCA |
| | c.1520T > C (p.Ile507Thr) | | | AATGTGAAACATGTTATCAAT′] |
| 2516 | NM_000158.3(GBE1): | 2632 | GBE1 | [′TGAATAAAAATCACAGTTATTACTTRCCAAG |
| | c.691 + 2T > C | | | GCCTTTGATTCTTGGTAGTA′] |
| 2517 | NM_000719.6(CACNA1C): | 775 | CACNA1C | [′ATGAACATCTTCGTGGGCTTCGTCAYCGTCA |
| | c.3497T > C (p.Ile1166Thr) | | | CCTTTCAGGAGCAGGGGGAG′] |
| 2518 | NM_001105.4(ACVR1): c.587T > | 90 | ACVR1 | [′TGTACATCAGGAAGTGGCTCTGGTCYTCCTT |
| | C (p.Leu196Pro) | | | TTCTGGTACAAAGAACAGTG′] |
| 2519 | NM_024531.4(SLC52A2): | 79581 | SLC52A2 | [′CCCTACGGGCGTCTGGCCTACCACCYGGCTG |
| | c.935T > C (p.Leu312Pro) | | | TGGTGCTGGGCAGTGCTGCC′] |
| 2520 | NM_033409.3(SLC52A3): | 113278 | SLC52A3 | [′AGCTGCCTTTCCGAAGTGCCCATCAYCTTCA |
| | c.224T > C (p.Ile75Thr) | | | CCCTGCTGGGCGTGGGAACC′] |
| 2521 | NM_033409.3(SLC52A3): | 113278 | SLC52A3 | [′GGTCTGCGTCTTCGGAATGGGCTCCYGGGTG |
| | c.49T > C (p.Trp17Arg) | | | ACCATCAATGGGCTCTGGGT′] |
| 2522 | NM_133433.3(NIPBL): | 25836 | NIPBL | [′CCATACCTTACCACTAAATGTAGTGYAAGTA |
| | c.6108 + 2T > C | | | TAGAGCTGTCTTATTCTTGT′] |
| 2523 | NM_002397.4(MEF2C): c.2T > C | 4208 | MEF2C | [′CGTAATCTGAATCTTTTTTCTCCCCDTAGTCC |
| | (p.Met1Thr) | | | CCGTTTTTCTTCTCTCTCT′] |
| 2524 | NM_000124.3(ERCC6): | 2074 | ERCC6 | [′AATACTCGCTGACCCTGCTTGTGCCRTATTT |
| | c.2551T> C (p.Trp851Arg) | | | TCAACAAAGACTCAACAACA′] |
| 2525 | NM_000208.2(INSR): | 3643 | INSR | [′GTTCATGCTGTTCTACAAAGAGGCGYAAGT |
| | c.1610 + 2T > C | | | AGAAGAGTTAGAGAGACGCTG′] |
| 2526 | NM_000071.2(CBS): c.325T > C | 875 | CBS | [′CTCCCGCCCGCGTTGAAGAACTCACRCTTGG |
| | (p.Cys109Arg) | | | CCACTGGGAGGCAGAGATGA′] |
| 2527 | NM_004550.4(NDUFS2): | 4720 | NDUFS2 | [′CATTATGCTCTCCACAGTGGAGTGAYGCTTC |
| | c.875T> C (p.Met292Thr) | | | GGGGCTCAGGCATCCAGTGG′] |
| 2528 | NM_003119.3(SPG7): c.2228T > | 6687 | SPG7 | [′AAGGAAGTGATAAACTATGAGGACAYTGAG |
| | C (p.Ile743Thr) | | | GCTCTCATTGGCCCGCCGCCC′] |
| 2529 | NM_000546.5(TP53): c.584T > C | 7157 | TP53 | [′CACACGCAAATTTCCTTCCACTCGGRTAAGA |
| | (p.Ile195Thr) | | | TGCTGAGGAGGGGCCAGACC′] |
| 2530 | NM_018972.2(GDAP1): c.347T > | 54332 | GDAP1 | [′AGGTTAATGCCTGATAAAGAAAGCAKGTAT |
| | C (p.Met116Thr) | | | TACCCACGGGTACAACATTAC′] |
| 2531 | NM_000070.2(CAPN3): c.566T > | 825 | CAPN3 | [′TGCCTGCCAACGTACAACAATCAACYGGTTT |
| | C (p.Leu189Pro) | | | TCACCAAGTCCAACCACCGC′] |
| 2532 | NM_000070.2(CAPN3): | 825 | CAPN3 | [′TTAATTCCTCCATTTTCCCACCAGAYGGAAG |
| | c.1117T > C (p.Trp373Arg) | | | GACTGGAGCTTTGTGGACAA′] |
| 2533 | NM_181534.3(KRT25): c.950T > | 147183 | KRT25 | [′AAATTGTTCTTTTCATACCGTGGCTRGGAGA |
| | C (p.Leu317Pro) | | | GACTGAAGTTCAATTTCCAG′] |
| 2534 | NM_001002294.2(FMO3): | 2328 | FMO3 | [′CCAGGTGTATTCAATGGAAAGCGTGBCCTG |
| | c.560T > C (p. Val187Ala) | | | GTGGTTGGCCTGGGGAATTCG′] |
| 2535 | NM_001080522.2(CC2D2A): | 57545 | CC2D2A | [′GAAATTCAAGCTGAAATAAGTGAACYGTTA |
| | c.1676T > C (p.Leu559Pro) | | | GAAGAGCACACGGAGGAGTAC′] |
| 2536 | NM_001080522.2(CC2D2A): | 57545 | CC2D2A | [′TACCAAGTCATATTTTCTTCACAGAYTGATG |
| | c.3596T > C (p.Ile1199Thr) | | | GAACATTTAAAATAGATATT′] |
| 2537 | NM_025114.3(CEP290): | 80184 | CEP290 | [′CCTGTAACAAATGTATTAAATATTCRTTCTG |
| | c.2343T > C (p.Asn781=) | | | AGAATTAATGATACTGGCAC′] |
| 2538 | NM_030578.3(B9D2): c.107T > C | 80776 | B9D2 | [′CGTTTGGCCCTCCCGCACGCCTGACRGGAGC |
| | (p.Leu36Pro) | | | TTCCATGCCGCCCCTGCAGT′] |
| 2539 | NM_004304.4(ALK): c.3520T > C | 238 | ALK | [′ACATCCCTCTCTGCTCTGCAGCAAAKTCAAC |
| | (p.Phe1174Leu) | | | CACCAGAACATTGTTCGCTG′] |

TABLE 7
Diseases/disorders containging A to G Changes. The table includes human gene
mutations that may be corrected by changing a guanine (G) to adenine (A). The gene name,
gene symbol,and Gene ID are indicated.

| SEQ | | | | |
|---|---|---|---|---|
| ID | | Gene | Gene | |
| NO: | Name | ID | Symbol | Flanks |
| 3144 | NM_017547.3(FOXRED1): | 55572 | FOXRED1 | [′GTGGGCCCCCACCCGCTAGTTGTCAVCATG |
| | c.1289A > G (p.Asn430Ser) | | | TACTTTGCTACTGGCTTCAGT′] |
| 3145 | NM_001006657.1(WDR35): | 57539 | WDR35 | [′CTAGTGCGGCTGTGGTTGCTTTTTCVGATT |
| | c.25 − 2A > G | | | TCCATTCCCAATAACGTGAAG′] |
| 3146 | NM_001006657.1(WDR35): | 57539 | WDR35 | [′TATGTTTTCAGAAACTTGGATCCTGRGGTA |
| | c.1877A > G (p.Glu626Gly) | | | AAAACAAGAAATGAGTGTTAA′] |
| 3147 | NM_000374.4(UROD): | 7389 | UROD | [′GGCAACCTGGACCCCTGTGCCTTGTRTGCA |
| | c.932A > G (p.Tyr311Cys) | | | TCTGAGGTAACAGCCAGGGCC′] |
| 3148 | NM_004315.4(ASAH1): | 427 | ASAH1 | [′ACAGAGGACTGCAGAAAATCAACCTRTCC |
| | c.155A > G (p.Tyr52Cys) | | | TCCTTCAGGACCAACGTGAGTA′] |
| 3149 | NM_004315.4(ASAH1): | 427 | ASAH1 | [′GGGTAGATGGTATGTGGTACAAACARATT |
| | c.1006A > G (p.Asn336Asp) | | | ATGACCGTTGGAAACATCCCTT′] |
| 3150 | NM_000071.2(CBS): c.1150A > G | 875 | CBS | [′GGTGACTCCCCCATCCCGCAGGACCRAGTT |
| | (p.Lys384Glu) | | | CCTGAGCGACAGGTGGATGCT′] |
| 3151 | NM_000274.3(OAT): c.734A > G | 4942 | OAT | [′GGCGTTGTTGTTCCGGATCCAGGTTRCCTA |
| | (p.Tyr245Cys) | | | ATGGGAGTGCGAGAGCTCTGC′] |
| 3152 | NM_001385.2(DPYS): | 1807 | DPYS | [′GATAACTGCACTTTCAACACCTGCCRGAA |
| | c.1001A > G (p.Gln334Arg) | | | AGCTCTTGGGAAGGATGATTTT′] |
| 3153 | NM_024598.3(USB1): c.502A > G | 79650 | USB1 | [′GATTTACACCAATCAAGAGAAAACCRGGT |
| | (p.Arg168Gly) | | | GGGTCCTCCCAACCCCCAATCA′] |
| 3154 | NM_001194958.2(KCNJ18): | 100134444 | KCNJ18 | [′AGTGCGAAGGATCTGGTAGAGAACARGTT |
| | c.1097A > G (p.Lys366Arg) | | | CCTGCTGCCCAGTGCCAACTCC′] |
| 3155 | NM_001914.3(CYB5A): | 1528 | CYB5A | [′TTTTTATTCTACCTCTCCTTTGAACRGCATC |
| | c.130 − 2A > G | | | CTGGTGGGGAAGAAGTTTTA′] |
| 3156 | NM_000398.6(CYB5R3): | 1727 | CYB5R3 | [′CGCTTCAAGCTCTGGTACACGCTGGRCAG |
| | c.719A > G (p.Asp240Gly) | | | AGCCCCTGAAGGTGAGTGAGGG′] |
| 3157 | NM_004628.4(XPC): | 7508 | XPC | [′ATTATTATTGTTATTACTATTACTGRTTTTT |
| | c.413 − 24A > G | | | AAAAATGCTTGTTGATAGAA′] |
| 3158 | NM_001134363.2(RBM20): | 282996 | RBM20 | [′TGGCCCAGAAAGGCCGCGGTCTCGTRGTC |
| | c.1909A > G (p.Ser637Gly) | | | CGGTGAGCCGGTCACTCTCCCC′] |
| 3159 | NM_000552.3(VWF): c.2384A > G | 7450 | VWF | [′GAGTGTACCAAAACGTGCCAGAACTRTGA |
| | (p.Tyr795Cys) | | | CCTGGAGTGCATGAGCATGGGC′] |
| 3160 | NM_000552.3(VWF): c.1583A > G | 7450 | VWF | [′ACCTGCGGCCTGTGTGGGAATTACARTGG |
| | (p.Asn528Ser) | | | CAACCAGGGCGACGACTTCCTT′] |
| 3161 | NM_144573.3(NEXN): c.1955A > G | 91624 | NEXN | [′ACTTTCCCAGAAGATGGAGGAGAGTRTAT |
| | (p.Tyr652Cys) | | | GTGTAAAGCAGTCAACAATAAA′] |
| 3162 | NM_000267.3(NF1): c.4267A > G | 4763 | NF1 | [′CGAAAGGGGCTTGAAGTTAATGTCARAGG |
| | (p.Lys1423Glu) | | | TGAATTATTTTGATAATCTAGC′] |
| 3163 | NM_000267.3(NF1): | 4763 | NF1 | [′TCTCTTTGTCTTTCTCTTTTTTAAARAATTC |
| | c.1642 − 8A > G | | | AGGCTCTGCTGGTTCTTCAT′] |
| 3164 | NM_000267.3(NF1): c.1466A > G | 4763 | NF1 | [′CCTACAGACCTGGAGACAAGAAGCTRTAA |
| | (p.Tyr489Cys) | | | GTATCTTCTCTTGTCCATGGTG′] |
| 3165 | NM_000267.3(NF1): | 4763 | NF1 | [′AAAAACATGTTATTTTCCTTCTTCARCTAG |
| | c.5944 − 5A > G | | | ATTACAGATCTGCTTGATGTT′] |
| 3166 | NM_000308.2(CTSA): | 5476 | CTSA | [′TACCATGGCCTTCTGGGGAACAGGTRTGG |
| | c.746 + 3A > G | | | GATAGGGCAGTTGGGCAATCTC′] |
| 3167 | NM_000308.2(CTSA): c.200A > G | 5476 | CTSA | [′CTGGCCAAGCAGCCGTCTTTCCGCCRGTAC |
| | (p.Gln67Arg) | | | TCCGGCTACCTCAAAGGCTCC′] |
| 3168 | NM_000308.2(CTSA): c.1238A > G | 5476 | CTSA | [′CTTTAGAAATACCAGATCCTATTATRTAAT |
| | (p.Tyr413Cys) | | | GGAGATGTAGACATGGCCTGC′] |
| 3169 | NM_000308.2(CTSA): c.1411A > G | 5476 | CTSA | [′CTCCCACATCGCCTTTCTCACGATCRAGGT |
| | (p.Lys471Glu) | | | AGGGACTGGGCCTGCTGAGAG′] |
| 3170 | NM_000353.2(TAT): | 6898 | TAT | [′TTCCAAACACAGTAGGGTCCCCTTTYTATG |
| | c.236 − 5A > G | | | GGAGGAAAACACAAAAGGAGC′] |
| 3171 | NM_000097.5(CPOX): c.1210A > G | 1371 | CPOX | [′TAATCTGCTGTATGATCGGGGCACARAGTT |
| | (p.Lys404Glu) | | | TGGCCTCTTCACTCCAGGATC′] |
| 3172 | NM_000317.2(PTS): c.155A > G | 5805 | PTS | [′AACAATCCAAATGGCCATGGGCACARTTA |
| | (p.Asn52Ser) | | | TAAAGGTGAGAGAAAAACTGAT′] |
| 3173 | NM_000317.2(PTS): c.139A > G | 5805 | PTS | [′ACTGTTTGGGAAATGCAACAATCCARATG |
| | (p.Asn47Asp) | | | GCCATGGGCACAATTATAAAGG′] |
| 3174 | NM_000317.2(PTS): c.347A > G | 5805 | PTS | [′GAAAATGTAGCTGTTTATATCTGGGRCAAC |
| | (p.Asp116Gly) | | | CTCCAGAAAGTTCTTCCTGTA′] |
| 3175 | NM_000320.2(QDPR): c.449A > G | 5860 | QDPR | [′CCCCATTTCCCAGGTATGATCGGGTRCGGC |
| | (p.Tyr150Cys) | | | ATGGCCAAGGGTGCTGTTCAC′] |
| 3176 | NM_173560.3(RFX6): | 222546 | RFX6 | [′TCTATTTTTCTTTATCATCCCTTCARCTGGC |
| | c.224 − 12A > G | | | AATCAGAAATGCACTTAAAC′] |
| 3177 | NM_001999.3(FBN2): | 2201 | FBN2 | [′TTCATCAATATCTGTGAAAACAGCAYTGC |
| | c.3725 − 15A > G | | | AACCACATTGTCAGGTCTGCTT′] |
| 3178 | NM_001040613.2(TMEM70): | 54968 | TMEM70 | [′GATCCTCTCTCTTTTTTTCCCATTTRGGTGT |
| | c.*7 − 2A > G | | | GAAATGTTTCTCTTATTCTA′] |
| 3179 | NM_152416.3(NDUFAF6): | 137682 | NDUFAF6 | [′AGGGCCTTTAATGTGGAACTGGCTCRGGCT |
| | c.296A > G (p.Gln99Arg) | | | GGTATTAAGATACCTTAAAAT′] |
| 3180 | NM_000140.3(FECH): | 2235 | FECH | [′ACTAAAACGATTGTAACACTGTAGAYACC |
| | c.1137 + 3A > G | | | TTAGAGAACAATGGATTTCCAT′] |
| 3181 | NM_000277.1(PAH): c.1A > G | 5053 | PAH | [′GAGACCTCACTCCCGGGGAGCCAGCDTGT |
| | (p.Met1Val) | | | CCACTGCGGTCCTGGAAAACCC′] |
| 3182 | NM_000277.1(PAH): c.611A > G | 5053 | PAH | [′TCCTTGTATAAAACCCATGCTTGCTRTGAG |
| | (p.Tyr204Cys) | | | TACAATCACATTTTTCCACTT′] |
| 3183 | NM_000277.1(PAH): c.1241A > G | 5053 | PAH | [′ATACCTCGGCCCTTCTCAGTTCGCTRCGAC |
| | (p.Tyr414Cys) | | | CCATACACCCAAAGGATTGAG′] |
| 3184 | NM_000277.1(PAH): c.662A > G | 5053 | PAH | [′CTTGAAAAGTACTGTGGCTTCCATGRAGAT |
| | (p.Glu221Gly) | | | AACATTCCCCAGCTGGAAGAC′] |
| 3185 | NM_000277.1(PAH): c.916A > G | 5053 | PAH | [′TTCTATTTTCCCCCAATTACAGGAARTTGG |
| | (p.Ile306Val) | | | CCTTGCCTCTCTGGGTGCACC′] |
| 3186 | NM_000277.1(PAH): c.1169A > G | 5053 | PAH | [′TTCCAGCCCCTGTATTACGTGGCAGRGAGT |
| | (p.Glu390Gly) | | | TTTAATGATGCCAAGGAGAAA′] |
| 3187 | NM_000277.1(PAH): | 5053 | PAH | [′TGTCATCCTTTGGTGAATTACAGGTVTGAC |
| | c.1065 + 3A > G | | | CTTCACAGGAACCAAGGATAG′] |
| 3188 | NM_000277.1(PAH): c.227A > G | 5053 | PAH | [′AGACCTTCTCGTTTAAAGAAAGATGVGTA |
| | (p.Glu76Gly) | | | TGAATTTTTCACCCATTTGGAT′] |
| 3189 | NM_000130.4(F5): c.1000A > G | 2153 | F5 | [′CATTAAAAACTGCCCAAAGAAAACCRGGA |
| | (p.Arg334Gly) | | | ATCTTAAGAAAATAACTCGTGA′] |
| 3190 | NM_000130.4(F5): c.5189A > G | 2153 | F5 | [′GGCTCTGCCTGTCGGGCTTGGGCCTRCTAC |
| | (p.Tyr1730Cys) | | | TCAGCTGTGAACCCAGTAGGT′] |
| 3191 | NM_000512.4(GALNS): | 2588 | GALNS | [′TTGGTCCCCGCGCAGCCCCAGCTCARCGTG |
| | c.1460A > G (p.Asn487Ser) | | | TGCAACTGGGCGGTCATGGTA′] |
| 3192 | NM_015702.2(MMADHC): | 27249 | MMADHC | [′ACTCTTTTTGAAACTGATGAACGCTRCCGA |
| | c.746A > G (p.Tyr249Cys) | | | CATTTAGGATTCTCTGTTGAT′] |
| 3193 | NM_015141.3(GPD1L): c.370A > G | 23171 | GPD1L | [′TAACTTCTTGGCATCCTTGTAGGGCRTAGA |
| | (p.Ile124Val) | | | CGAGGGCCCCGAGGGGCTGAA′] |
| 3194 | NM_013319.2(UBIAD1): | 29914 | UBIAD1 | [′GTGCACGGGGCCGGTAATTTGGTCARCAC |
| | c.305A > G (p.Asn102Ser) | | | TTACTATGACTTTTCCAAGGGC′] |
| 3195 | NM_013319.2(UBIAD1): | 29914 | UBIAD1 | [′CATTGACCACAAAAAGAGTGATGACRGGA |
| | c.355A > G (p.Arg119Gly) | | | CACTTGTGGACCGAATCTTGGA′] |
| 3196 | NM_013319.2(UBIAD1): | 29914 | UBIAD1 | [′AGCACCGAGGCCATTCTCCATTCCARCAAC |
| | c.695A > G (p.Asn232Ser) | | | ACCAGGGACATGGAGTCCGAC′] |
| 3197 | NM_013319.2(UBIAD1): | 29914 | UBIAD1 | [′TACTATGACTTTTCCAAGGGCATTGRCCAC |
| | c.335A > G (p.Asp112Gly) | | | AAAAAGAGTGATGACAGGACA′] |
| 3198 | NM_000046.3(ARSB): c.629A > G | 411 | ARSB | [′GTTGCAACAGGATATAAAAATATGTRTTC |
| | (p.Tyr210Cys) | | | AACAAACATATTCACCAAAAGG′] |
| 3199 | NM_006331.7(EMG1): c.257A > G | 10436 | EMG1 | [′CGGGACCCTGGGGAAGCGCGGCCAGRTAT |
| | (p.Asp86Gly) | | | CACCCACCAGGTAACTCCAGGG′] |
| 3200 | NM_000181.3(GUSB): c.1484A > G | 2990 | GUSB | [′CTGCTGCTCTGGTCCTAGGCTCCGTRTGTG |
| | (p.Tyr495Cys) | | | GATGTGATCTGTTTGAACAGC′] |
| 3201 | NM_000067.2(CA2): c.754A > G | 760 | CA2 | [′CTGGCGCCCAGCTCAGCCACTGAAGRACA |
| | (p.Asn252Asp) | | | GGCAAATCAAAGCTTCCTTCAA′] |
| 3202 | NM_000067.2(CA2): c.52A > G | 760 | CA2 | [′TCCCCCAGGACCTGAGCACTGGCATVAGG |
| | (p.Lys18Glu) | | | ACTTCCCCATTGCCAAGGGAGA′] |
| 3203 | NM_000404.2(GLB1): c.947A > G | 2720 | GLB1 | [′TTTATAGGTGGGACCAATTTTGCCTRTTGG |
| | (p.Tyr316Cys) | | | AATGGTAAGAGCACTTTAATA′] |
| 3204 | NM_000404.2(GLB1): c.1498A > G | 2720 | GLB1 | [′TTTGCAGGGTTTGGTTTCTAACCTGRCTCT |
| | (p.Thr500Ala) | | | CAGTTCCAATATCCTCACGGA′] |
| 3205 | NM_000404.2(GLB1): | 2720 | GLB1 | [′GAGAGTCAGGTTAGAAACCAAACCCYGCA |
| | c.1480 − 2A > G | | | AAGCAGAAACAGAGCACAGTGA′] |
| 3206 | NM_000404.2(GLB1): c.1772A > G | 2720 | GLB1 | [′ATTAATGGCTTTAACCTTGGCCGCTRTTGG |
| | (p.Tyr591Cys) | | | CCAGCCCGGGGCCCTCAGTTG′] |
| 3207 | NM_203447.3(DOCK8): | 81704 | DOCK8 | [′ACTCTGAGCGTTAGCAGCTTTTTCARGCAG |
| | c.1418A > G (p.Lys473Arg) | | | GTATCTCTTCACATTACAGTG′] |
| 3208 | NM_000275.2(OCA2): c.1465A > G | 4948 | OCA2 | [′TGCCACTGCCATCGGGGACCCTCCARATGT |
| | (p.Asn489Asp) | | | CATTATTGTTTCCAACCAAGA′] |
| 3209 | NM_152778.2(MFSD8): c.362A > G | 256471 | MFSD8 | [′ATTTCCGTGGCAGCCAACTGCCTCTVTGCA |
| | (p.Tyr121Cys) | | | TATCTCCACATCCCAGCTTCT′] |
| 3210 | NM_139241.3(FGD4): | 121512 | FGD4 | [′ACTGTTCATTTTTCTTTTAAATTTARGGTGG |
| | c.1762 − 2A > G | | | TTTGTTGGAAATGCTCCGAC′] |
| 3211 | NM_020223.3(FAM20C): | 56975 | FAM20C | [′TGTGACACTTTCTGCCTCTCTCCGCRGGAA |
| | c.1364 − 2A > G | | | ACATGGACCGTCACCACTACG′] |
| 3212 | NM_138387.3(G6PC3): c.346A > G | 92579 | G6PC3 | [′GGCAGGCAGCCCTTCTGGACACTGCRTGA |
| | (p.Met116Val) | | | TCACAGGAGCAGCCCTCTGGCC′] |
| 3213 | NM_018122.4(DARS2): c.133A > G | 55157 | DARS2 | [′TTTTTTTTTTTTTTTTAAAGAATTCRGTAGC |
| | (p.Ser45Gly) | | | TTTGTTGTCCGGACCAACAC′] |
| 3214 | NM_000642.2(AGL): | 178 | AGL | [′CATCTTTTATTTAACTTAAATTTCARTCATT |
| | c.4260 − 12A > G | | | TTGCAGTGATATGGTTTACT′] |
| 3215 | NM_000642.2(AGL): c.3439A > G | 178 | AGL | [′TCTACTGGGTGAAGGAATTTATGCCRGATA |
| | (p.Arg1147Gly) | | | CAATTGTCGGGATGCTGTGTG′] |
| 3216 | NM_145014.2(HYLS1): c.632A > G | −1 | — | [′TTAAGCCGAAACCGGGGCAAGACAGRCCG |
| | (p.Asp211Gly) | | | GGTAGCCCGGTATTTTGAGTAC′] |
| 3217 | NM_014362.3(HIBCH): c.365A > G | 26275 | HIBCH | [′GCTCCAGTTTTCTTCAGAGAAGAATRTATG |
| | (p.Tyr122Cys) | | | CTGAATAATGCTGTTGGTATG′] |
| 3218 | NM_014846.3(KIAA0196): | 9897 | KIAA0196 | [′TTTTCTTATTTCTGTATTACTAGAARACCTT |
| | c.1411A > G (p.Asn471Asp) | | | CAAGCTTGGTTCAGAGAGAT′] |
| 3219 | NM_000505.3(F12): c.158A > G | 2161 | F12 | [′GAGCCCTGCCACTTCCCCTTCCAGTRCCAC |
| | (p.Tyr53Cys) | | | CGGCAGCTGTACCACAAATGT′] |
| 3220 | NM_001029871.3(RSPO4): | 343637 | RSPO4 | [′TTCATCCGCCGGGAAGGCATCCGCCRGTA |
| | c.194A > G (p.Gln65Arg) | | | CGGCAAGTGCCTGCACGACTGT′] |
| 3221 | NM_017654.3(SAMD9): | 54809 | SAMD9 | [′TAAAAGACTGGAAAGACTTGTTCACRAAG |
| | c.4483A > G (p.Lys1495Glu) | | | GAAAAATTGACCAGTGCTTTAA′] |
| 3222 | NM_152419.2(HGSNAT): | 138050 | HGSNAT | [′TGTCTTAATTTTACCTAATGTTTGTRGGTTG |
| | c.372 − 2A > G | | | GAATACAGATTTGGAGAATT′] |
| 3223 | NM_001174089.1(SLC4A11): | 83959 | SLC4A11 | [′CATGAGCTCCCTGCCCTACATGAAGRTGAT |
| | c.2518A > G (p.Met840Val) | | | CTTTCCCCTCATCATGATCGC′] |
| 3224 | NM_012073.4(CCT5): c.440A > G | 22948 | CCT5 | [′CAGGCTGCTCGTGTTGCTATTGAACRCCTG |
| | (p.His147Arg) | | | GACAAGATCAGCGATAGCGTC′] |
| 3225 | NM_025114.3(CEP290): | 80184 | CEP290 | [′CACCTGGCCCCAGTTGTAATTGTGARTATC |
| | c.2991 + 1655A > G | | | TCATACCTATCCCTATTGGCA′] |
| 3226 | NM_153704.5(TMEM67): | 91147 | TMEM67 | [′TATTAAAACAGTTGTAACTGTTTATRGGAG |
| | c.870 − 2A > G | | | ACAGAATCTTCCTTGGCTGTT′] |
| 3227 | NM_153704.5(TMEM67): | 91147 | TMEM67 | [′TATCAGGTTTCTTTCTCAGTCACATDTGAA |
| | c.1538A > G (p.Tyr513Cys) | | | ATGGATCATGGAGAAGCACAT′] |
| 3228 | NM_001041.3(SI): c.350A > G | 6476 | SI | [′GTTGATAATCATGGTTATAACGTTCRAGAC |
| | (p.Gln117Arg) | | | ATGACAACAACAAGTATTGGT′] |
| 3229 | NM_015697.7(COQ2): c.890A > G | 27235 | COQ2 | [′TCTGGAGTTATGTGGACACTAATATRTGAT |
| | (p.Tyr297Cys) | | | ACTATTTATGCCCATCAGGTA′] |
| 3230 | NM_015697.7(COQ2): c.683A > G | 27235 | COQ2 | [′GCACTGGGTGTTCTTCTGTGTCTAARTTAC |
| | (p.Asn228Ser) | | | TACAGGTATATTAAACGTTTT′] |
| 3231 | NM_000190.3(HMBS): c.1A > G | 3145 | HMBS | [′CACAGCCTACTTTCCAAGCGGAGCCRTGTC |
| | (p.Met1Val) | | | TGGTAACGGCAATGCGGCTGC′] |
| 3232 | NM_004035.6(ACOX1): c.832A > G | 51 | ACOX1 | [′GAGTAACAAGCTGACTTACGGGACCRTGG |
| | (p.Met278Val) | | | TGTTTGTCAGGTCCTTCCTTGT′] |
| 3233 | NM_004035.6(ACOX1): c.926A > G | 51 | ACOX1 | [′ATCCGATACAGCGCTGTGAGGCACCRGTC |
| | (p.Gln309Arg) | | | TGAAATCAAGCCAGGGTAAGGA′] |
| 3234 | NM_000237.2(LPL): c.548A > G | 4023 | LPL | [′TGCTTTTTTCCCTTTTAAGGCCTCGRTCCAG |
| | (p.Asp183Gly) | | | CTGGACCTAACTTTGAGTAT′] |
| 3235 | NM_000237.2(LPL): c.953A > G | 4023 | LPL | [′TGCAACAATCTGGGCTATGAGATCARTAA |
| | (p.Asn318Ser) | | | AGTCAGAGCCAAAAGAAGCAGC′] |
| 3236 | NM_001171993.1(HPD): | 3242 | HPD | [′TACATCGGCCAATTCTTGCCTGGATRTGAG |
| | c.362A > G (p.Tyr121Cys) | | | GCCCCAGCGTTCATGGACCCC′] |
| 3237 | NM_139281.2(WDR36): | 134430 | WDR36 | [′CTTCTTGTCACAAATGGCGCTGACARTGCT |
| | c.1064A > G (p.Asn355Ser) | | | CTTAGGGTATTATGATTATTG′] |
| 3238 | NM_001127255.1(NLRP7): | −1 | —— | [′CTCACAAACCTGGACTTGAGTATCARCCA |
| | Ac.2738 > G (p.Asn913Ser) | | | GATAGCTCGTGGATTGTGGATT′] |
| 3239 | NM_016417.2(GLRX5): c.294A > G | 51218 | GLRX5 | [′TGCTGGACGACCCGGAGCTCCGACARGGT |
| | (p.Gln98=) | | | CAGGCCAGTGTGCCGGGCAGGC′] |
| 3240 | NM_024884.2(L2HGDH): c.293A > | 79944 | L2HGDH | [′ACTGGACATAACAGTGGTGTCATACRTAG |
| | G (p.His98Arg) | | | TGGAATTTATTATAAACCTGAG′] |
| 3241 | NM_000382.2(ALDH3A2): | 224 | ALDH3A2 | [′ACATCCAGTGGAGGTGTCACAGGCARTGA |
| | c.1157A > G (p.Asn386Ser) | | | CGTCATTATGCACTTCACGCTC′] |
| 3242 | NM_018105.2(THAP1): c.266A > G | 55145 | THAP1 | [′TTTCTTTGTACTGAGCCACATGACARGGTA |
| | (p.Lys89Arg) | | | ATATGCATTTTAAAATATTGG′] |
| 3243 | NM_000785.3(CYP27B1): | 1594 | CYP27B1 | [′GCCCTGGTTCGGGACGTGGCGGGGGRATT |
| | c.566A > G (p.Glu189Gly) | | | TTACAAGTTCGGACTGGAAGGT′] |
| 3244 | NM_182548.3(LHFPL5): | 222662 | LHFPL5 | [′TTCATCTGCAACACGGCCACAGTCTRTAAG |
| | c.380A > G(p.Tyr127Cys) | | | ATCTGTGCATGGATGCAGCTG′] |
| 3245 | NM_015040.3(PIKFYVE): | 200576 | PIKFYVE | [′TTCAAAGAAATGGAGAACAGGAGGARGA |
| | c.3308A > G (p.Lys1103Arg) | | | AACAGCTGCTCAGGGATCTCTCT′] |
| 3246 | NM_138701.3(MPLKIP): | 136647 | MPLKIP | [′GTTGGAAAATTATTTCAAGCCTTCARTGCT |
| | c.430A > G (p.Met144Val) | | | TGAAGATCCTTGGGCTGGCCT′] |
| 3247 | NM_152783.4(D2HGDH): | 728294 | D2HGDH | [′TGCCCTTGTCCCTCCAGGAGATGGTRACCT |
| | c.1315A > G (p.Asn439Asp) | | | GCACCTCAATGTGACGGCGGA′] |
| 3248 | NM_022912.2(REEP1): | 65055 | REEP1 | [′AACTTGTGTTTTCATCTCTCTCTCCRGGTTT |
| | c.183 − 2A > G | | | CCATTCTATTATGAACTAAA′] |
| 3249 | NM_000060.3(BTD): c.755A > G | 686 | BTD | [′ACATGCTTTGATATATTGTTCTTTGRCCCT |
| | (p.Asp252Gly) | | | GCCATCAGAGTCCTCAGAGAC′] |
| 3250 | NM_022132.4(MCCC2): | 64087 | MCCC2 | [′TGTGGCCTGTGCCCAAGTGCCTAAGDTAA |
| | c.1309A > G (p.Ile437Val) | | | CCCTCATCATTGGGGGCTCCTA′] |
| 3251 | NM_022132.4(MCCC2): c.569A > G | 64087 | MCCC2 | [′GCAGATGTGTTTCCAGATCGAGACCRCTTT |
| | (p.His190Arg) | | | GGCCGTACATTCTATAATCAG′] |
| 3252 | NM_198578.3(LRRK2): | 120892 | LRRK2 | [′ATCATCCGACTATATGAAATGCCTTRTTTT |
| | c.5096A > G (p.Tyr1699Cys) | | | CCAATGGGATTTTGGTCAAGA′] |
| 3253 | NM_198578.3(LRRK2): | 120892 | LRRK2 | [′TGTGACTAGAAATAAAATATCAGGGRTAT |
| | c.3364A > G(p.Ile1122Val) | | | GCTCCCCCTTGAGACTGAAGGA′] |
| 3254 | NM_000022.2(ADA): | 100 | ADA | [′TTCCCAACCCCTTTCTTCCCTTCCCRGGGG |
| | c.219 − 2A > G | | | CTGCCGGGAGGCTATCAAAAG′] |
| 3255 | NM_000022.2(ADA): c.290A > G | 100 | ADA | [′ATGAAGGCCAAAGAGGGCGTGGTGTDTGT |
| | (p.Tyr97Cys) | | | GGAGGTGCGGTACAGTCCGCAC′] |
| 3256 | NM_017780.3(CHD7): c.3082A > G | 55636 | CHD7 | [′TTTAGTAATTGCCCCATTGTCCACARTCCC |
| | (p.Ile1028Val) | | | CAACTGGGAAAGGGAATTCCG′] |
| 3257 | NM_017780.3(CHD7): c.164A > G | 55636 | CHD7 | [′TTTGCCTCTTTACAGCCATCCCTTCRTCATC |
| | (p.His55Arg) | | | CTTCAACTAATCAAAATCAA′] |
| 3258 | NM_152443.2(RDH12): c.677A > G | 145226 | RDH12 | [′GTCCCAGGCACCGGGGTCACCACCTRCGC |
| | (p.Tyr226Cys) | | | AGTGCACCCAGGCGTCGTCCGC′] |
| 3259 | NM_015335.4(MED13L): | 23389 | MED13L | [′TACCCGATGGTGCTAAAAAAGAAAGRAGA |
| | c.752A > G (p.Glu251Gly) | | | ATCGAAAGAGGAAGACGAGTTG′] |
| 3260 | NM_015335.4(MED13L): | 23389 | MED13L | [′GCTTTTTTTCCCCCCTTCCCTCTAGRTGATA |
| | c.6068A > G (p.Asp2023Gly) | | | TGTTTGTTGACCTTCCATTC′] |
| 3261 | NM_025265.3(TSEN2): c.926A > G | 80746 | TSEN2 | [′TATTTTCAGGCCTTTTTCTTGGTCTRTGCTC |
| | (p.Tyr309Cys) | | | TGGGATGTTTAAGTATTTAC′] |
| 3262 | NM_015384.4(NIPBL): | 25836 | NIPBL | [′AAAACAGACGTGACTATGCTCTTGTRTATA |
| | c.7289A > G (p.Tyr2430Cys) | | | GCAGACAATCTAGCCTGTTTT′] |
| 3263 | NM_207352.3(CYP4V2): | 285440 | CYP4V2 | [′GTCATCTTATCTACTTGCTTTCATCRGGGA |
| | c.1091 − 2A > G | | | AGTCTGACCGTCCCGCTACAG′] |
| 3264 | NM_024006.5(VKORC1): | 79001 | VKORC1 | [′CAGCTGTTCGCGCGTCTTCTCCTCCRGGTG |
| | c.172A >G (p.Arg58Gly) | | | TGCACGGGAGTGGGAGGCGTG′] |
| 3265 | NM_000551.3(VHL): c.491A > G | 7428 | VHL | [′TATACTCTGAAAGAGCGATGCCTCCRGGTT |
| | (p.Gln164Arg) | | | GTCCGGAGCCTAGTCAAGCCT′] |
| 3266 | NM_000101.3(CYBA): c.281A > G | 1535 | CYBA | [′AATTACTATGTTCGGGCCGTCCTGCRTCTC |
| | (p.His94Arg) | | | CTGTGAGTCCCCGTCCCGCAC′] |
| 3267 | NM_014874.3(MFN2): c.827A > G | 9927 | MFN2 | [′TTGTTTGGGCTCCAGGTGCGGCGGCRGCAC |
| | (p.Gln276Arg) | | | ATGGAGCGTTGTACCAGCTTC′] |
| 3268 | NM_015046.5(SETX): c.1807A > G | 23064 | SETX | [′GCAGAAGTCAGATCCACAAAAGTGTYACA |
| | (p.Asn603Asp) | | | TGGAGGTGCTTTGAATTTTATG′] |
| 3269 | NM_005609.2(PYGM): c.1A > G | 5837 | PYGM | [′CAGTCCGGCCCGCCCTCCTGCAGCCVTGTC |
| | (p.Met1Val) | | | CCGGCCCCTGTCAGACCAAGA′] |
| 3270 | NM_033071.3(SYNE1): | 23345 | SYNE1 | [′ACTTCACTTCTGTTTTATCCCTGTARTGTTT |
| | c.15705 − 12A > G | | | CTGAAGCATGCAGGAGAAAG′] |
| 3271 | NM_130468.3(CHST14): | 113189 | CHST14 | [′CTGTGCCAGCCTTGTGCCGTGCACTRTGAC |
| | c.878A > G (p.Tyr293Cys) | | | TTTGTGGGCTCCTATGAGAGG′] |
| 3272 | NM_206933.2(USH2A): | 7399 | USH2A | [′AAAAGTTTTGTATTACGAATTATACRGAAG |
| | c.14020A > G (p.Arg4674Gly) | | | ACAAATAGCAACTCAGCCTAG′] |
| 3273 | NM_000048.3(ASL): c.857A > G | 435 | ASL | [′AGCACGGGAAGCAGCCTGATGCCCCRGAA |
| | (p.Gln286Arg) | | | GAAAAACCCCGACAGTTTGGAG′] |
| 3274 | NM_001875.4(CPS1): c.1010A > G | 1373 | CPS1 | [′CAGGCTTTCATTACTGCTCAGAATCRTGGC |
| | (p.His337Arg) | | | TATGCCTTGGACAACACCCTC′] |
| 3275 | NM_001173464.1(KIF21A): | 55605 | KIF21A | [′GACCATTTCCAACATGGAGGCAGATRTGA |
| | c.2839A > G (p.Met947Val) | | | ATAGACTCCTCAAGGTGTGGAA′] |
| 3276 | NM_000026.2(ADSL): c.736A > G | 158 | ADSL | [′CATCACAGGGCAGACATATACACGARAAG |
| | (p.Lys246Glu) | | | TGGATATTGAAGTACTGTCTGT′] |
| 3277 | NM_024577.3(SH3TC2): | 79628 | SH3TC2 | [′AGCCATTGCTTTTCTCATTATCCACRGGCC |
| | c.530 − 2A > G | | | ACTTCTTCTGCAGAGCCCTGT′] |
| 3278 | NM_018249.5(CDK5RAP2): | 55755 | CDK5RAP | [′AGCATGGGAGATGATTTATCTTTCARTCTC |
| | c.4005 − 15A > G | | 2 | AATGGTTAAGGATTGAGGAAG′] |
| 3279 | NM_000346.3(SOX9): c.517A > G | 6662 | SOX9 | [′GCACAAGAAGGACCACCCGGATTACRAGT |
| | (p.Lys173Glu) | | | ACCAGCCGCGGCGGAGGAAGTC′] |
| 3280 | NM_144596.3(TTC8): | 123016 | TTC8 | [′GTTTACTGCCTTCTTAATGCTTTCCRGGAA |
| | c.115 − 2A > G | | | CCAGATCCTGAATTGCCAGTG′] |
| 3281 | NM_000243.2(MEFV): c.2080A > G | 4210 | MEFV | [′GAATGGCTACTGGGTGGTGATAATGDTGA |
| | (p.Met694Val) | | | AGGAAAATGAGTACCAGGCGTC′] |
| 3282 | NM_000243.2(MEFV): c.2084A > G | 4210 | MEFV | [′GGCTACTGGGTGGTGATAATGATGADGGA |
| | (p.Lys695Arg) | | | AAATGAGTACCAGGCGTCCAGC′] |
| 3283 | NM_006493.2(CLN5): c.1121A > G | 1203 | CLN5 | [′GTGCACAAACAGTTCTATTTGTTTTRTAAT |
| | (p.Tyr374Cys) | | | TTTGAATATTGGTTTTTACCT′] |
| 3284 | NM_000483.4(APOC2): c.1A > G | −1 | — | [′TCAATGTTCCAGGTCTCTGGACACTRTGGG |
| | (p.Met1Val) | | | CACACGACTCCTCCCAGCTCT′] |
| 3285 | NM_058172.5(ANTXR2): | 118429 | ANTXR2 | [′TGGCCAACTGTGGATGCTTCCTATTDTGGT |
| | c.1142A > G (p.Tyr381Cys) | | | GGTCGAGGGGTTGGAGGAATT′] |
| 3286 | NM_001128085.1(ASPA): | −1 | — | [′TATAAAATTATAGAGAAAGTTGATTRCCCC |
| | c.692A > G (p.Tyr231Cys) | | | CGGGATGAAAATGGAGAAATT′] |
| 3287 | NM_001128085.1(ASPA): | −1 | — | [′ATCTTTGGAGGAACCCATGGGAATGRGCT |
| | c.71A > G (p.Glu24Gly) | | | AACCGGAGTATTTCTGGTTAAG′] |
| 3288 | NM_014365.2(HSPB8): c.421A > G | 26353 | HSPB8 | [′TGGCATTGTTTCTAAGAACTTCACARAGAA |
| | (p.Lys141Glu) | | | AATCCAGTAAGTAACCTGGAG′] |
| 3289 | NM_000391.3(TPP1): c.857A > G | 1200 | TPP1 | [′CAGTACCTGATGAGTGCTGGTGCCARCATC |
| | (p.Asn286Ser) | | | TCCACCTGGGTCTACAGTAGC′] |
| 3290 | NM_000391.3(TPP1): | 1200 | TPP1 | [′TGTCCCTCATGCCGGCCTGGATTTTYTTTTT |
| | c.887 − 10A > G | | | TTTTTTTTTTGAGGGATGGG′] |
| 3291 | NM_182760.3(SUMF1): c.1A > G | 285362 | SUMF1 | [′CGGGTCACATGGCCCGCGGGACAACRTGG |
| | (p.Met1Val) | | | CTGCGCCCGCACTAGGGCTGGT′] |
| 3292 | NM_031443.3(CCM2): c.1A > G | 83605 | CCM2 | [′GGCCGCGGGAGCCGCACGCGGCGATRTGG |
| | (p.Met1Val) | | | AAGAGGAGGGCAAGAAGGGCAA′] |
| 3293 | NM_004183.3(BEST1): c.707A > G | 7439 | BEST1 | [′GACTGGATTAGTATCCCACTGGTGTRTACA |
| | (p.Tyr236Cys) | | | CAGGTGAGGACTAGGCTGGTG′] |
| 3294 | NM_004183.3(BEST1): c.680A > G | 7439 | BEST1 | [′ACTCAGTGTGGACACCTGTATGCCTRCGAC |
| | (p.Tyr227Cys) | | | TGGATTAGTATCCCACTGGTG′] |
| 3295 | NM_000158.3(GBE1): c.1634A > G | 2632 | GBE1 | [′TGTAATGCAGGTAATGAATTTGGGCRTCCT |
| | (p.His545Arg) | | | GAATGGTTAGACTTCCCAAGA′] |
| 3296 | NM_000158.3(GBE1): c.1883A > G | 2632 | GBE1 | [′GGTCTTCTTTTCATTTTCAACTTCCRTCCAA |
| | (p.His628Arg) | | | GCAAGAGCTACACTGACTAC′] |
| 3297 | NM_017890.4(VPS13B): | 157680 | VPS13B | [′CTTCTGCCCTGGGCCCTGCTTATCARTGAA |
| | c.8978A > G (p.Asn2993Ser) | | | TCCAAATGGGACCTCTGGCTA′] |
| 3298 | NM_000019.3(ACAT1): c.278A > G | 38 | ACAT1 | [′GAAGTGAAAGAAGCATACATGGGTARTGT |
| | (p.Asn93Ser) | | | TCTACAAGGAGGTGAAGGACAA′] |
| 3299 | NM_173076.2(ABCA12): | 26154 | ABCA12 | [′CATATTACTTCATTGCTGGGGCCCARTGGA |
| | c.4139A > G (p.Asn1380Ser) | | | GCTGGGAAAACTACTACCATG′] |
| 3300 | NM_030665.3(RAI1): c.4685A > G | 10743 | RAI1 | [′AAGGGGCGTGCCAAGCGACGACGACRGCA |
| | (p.Gln1562Arg) | | | GCAGGTGCTGCCCCTGGATCCC′] |
| 3301 | NM_000271.4(NPC1): c.3467A > G | 4864 | NPC1 | [′AGTCTGAACGCTGTATCCTTGGTCARCCTG |
| | (p.Asn1156Ser) | | | GTGATGGTGAGTCCTCATACA′] |
| 3302 | NM_000271.4(NPC1): c.3263A > G | 4864 | NPC1 | [′CCCTCCAGTGTGTTTTATGTCTTCTRCGAA |
| | (p.Tyr1088Cys) | | | CAGTACCTGACCATCATTGAC′] |
| 3303 | NM_000543.4(SMPD1): | 6609 | SMPD1 | [′CTCCGCCTCATCTCTCTCAATATGARTTTTT |
| | c.1154A > G (p.Asn385Ser) | | | GTTCCCGTGAGAACTTCTGG′] |
| 3304 | NM_000226.3(KRT9): c.469A > G | 3857 | KRT9 | [′TCTGACTGCTAATGAGAAGAGCACCRTGC |
| | (p.Met157Val) | | | AGGAACTCAATTCTCGGCTGGC′] |
| 3305 | NM_000226.3(KRT9): c.482A > G | 3857 | KRT9 | [′GAGAAGAGCACCATGCAGGAACTCADTTC |
| | (p.Asn161Ser) | | | TCGGCTGGCCTCTTACTTGGAT′] |
| 3306 | NM_176824.2(BBS7): c.968A > G | 55212 | BBS7 | [′ACAGGTCTGACAACAGAGCCCATTCRTAA |
| | (p.His323Arg) | | | GGAAAGTGGACCAGGAGAAGAA′] |
| 3307 | NM_000051.3(ATM): c.3118A > G | 472 | ATM | [′GAGGAAATATATATTCTCTGTAAGARTGG |
| | (p.Met1040Val) | | | CCCTAGTAAATTGCCTTAAAAC′] |
| 3308 | NM_000051.3(ATM): c.7268A > G | 472 | ATM | [′GCTCTCCTGAAAAGAGCCAAAGAGGRAGT |
| | (p.Glu2423Gly) | | | AGGTCTCCTTAGGGAACATAAA′] |
| 3309 | NM_000051.3(ATM): c.8030A > G | −1 | — | [′TATTAGGTGGACCACACAGGAGAATRTGG |
| | (p.Tyr2677Cys) | | | AAATCTGGTGACTATACAGTCA′] |
| 3310 | NM_000487.5(ARSA): | 410 | ARSA | [′GAGGGGGTTTGTGCCTGATAACGTARTAA |
| | c.*96A > G | | | CACCAGTGGAGACTTGCAGATG′] |
| 3311 | NM_000487.5(ARSA): c.1055A > G | 410 | ARSA | [′GCCCTGGCTGGGGCCCCACTGCCCARTGTC |
| | (p.Asn352Ser) | | | ACCTTGGATGGCTTTGACCTC′] |
| 3312 | NM_000218.2(KCNQ1): c.418A > G | 3784 | KCNQ1 | [′CATCGTCCTGGTCTGCCTCATCTTCRGCGT |
| | (p.Ser140Gly) | | | GCTGTCCACCATCGAGCAGTA′] |
| 3313 | NM_172250.2(MMAA): c.620A > G | 166785 | MMAA | [′GAGTTATCAAGAGATATGAATGCATRCAT |
| | (p.Tyr207Cys) | | | CAGGCCATCTCCTACTAGAGGA′] |
| 3314 | NM_000187.3(HGD): c.1112A > G | 3081 | HGD | [′AGTCTACACAGCACAATGACCCCCCRTGG |
| | (p.His371Arg) | | | ACCTGATGCTGACTGCTTTGAG′] |
| 3315 | NM_000187.3(HGD): c.1102A > G | 3081 | HGD | [′AGGGGGAGGGAGTCTACACAGCACARTGA |
| | (p.Met368Val) | | | CCCCCCATGGACCTGATGCTGA′] |
| 3316 | NM_138477.2(CDAN1): | 146059 | CDAN1 | [′CTGAGCTTGAAGATCCAGGAGCTCARTGG |
| | c.1796A > G (p.Asn599Ser) | | | TCTTGCCCTGCCCCAGCATGAG′] |
| 3317 | NM_001079802.1(FKTN): | 2218 | FKTN | [′GTAAAACTTGATGTTTTTTTCTTCTRTGAA |
| | c.1112A > G (p.Tyr371Cys) | | | GAAACTGATCACATGTGGAAT′] |
| 3318 | NM_013382.5(POMT2): | 29954 | POMT2 | [′GCTTGAGAAGAGCATGGCTGGGAAGYAGT |
| | c.1997A > G (p.Tyr666Cys) | | | GGTGGAAGTAGAGGACCCGGCC′] |
| 3319 | NM_000529.2(MC2R): c.761A > G | 4158 | MC2R | [′CCAAGTAACCCCTACTGCGCCTGCTRCATG |
| | (p.Tyr254Cys) | | | TCTCTCTTCCAGGTGAACGGC′] |
| 3320 | NM_000383.3(AIRE): c.247A > G | 326 | AIRE | [′CCTGGACTTCTGGAGGGTGCTGTTCRAGGA |
| | (p.Lys83Glu) | | | CTACAACCTGGAGCGCTATGG′] |
| 3321 | NM_020436.3(SALL4): | 57167 | SALL4 | [′TCGTCTGCTAGCGCTCTTCAGATCCRCGAG |
| | c.2663A > G (p.His888Arg) | | | CGGACTCACACTGGAGAGAAG′] |
| 3322 | NM_203288.1(RP9): c.509A > G | 6100 | RP9 | [′CAGTTACTGGAGGATTCTACCTCAGRTGAA |
| | (p.Asp170Gly) | | | GATAGGAGCAGCTCCAGTTCC′] |
| 3323 | NM_000348.3(SRD5A2): | 6716 | SRD5A2 | [′TTCCTTGGGCTGCGAGCTTTTCACCRCCAT |
| | c.692A > G (p.His231Arg) | | | AGGTAAATTTTTCAATAAAAG′] |
| 3324 | NM_006445.3(PRPF8): | 10594 | PRPF8 | [′CCCAAAGAGTTCTACCACGAGGTGCVCAG |
| | c.6926A > G (p.His2309Arg) | | | GCCCTCTCACTTCCTCAACTTT′] |
| 3325 | NM_018319.3(TDP1): c.1478A > G | 55775 | TDP1 | [′TCTGGCCGCAGCAATGCCATGCCACRTATT |
| | (p.His493Arg) | | | AAGACATATATGAGGCCTTCT′] |
| 3326 | NM_144773.2(PROKR2): | 128674 | PROKR2 | [′AGCCAGGAGAAGATCTTCTGTGGCCRGAT |
| | c.629A > G (p.Gln210Arg) | | | CTGGCCTGTGGATCAGCAGCTC′] |
| 3327 | NM_001604.5(PAX6): | 5080 | PAX6 | [′ACCACAGGTTTGCCTCTCTCCTCACRGCCC |
| | c.1075 − 2A > G | | | CCAGTCCCCAGCCAGACCTCC′] |
| 3328 | NM_000280.4(PAX6): c.1171A > G | 5080 | PAX6 | [′CAGTCAGCCAATGGGCACCTCGGGCRCCA |
| | (p.Thr391Ala) | | | CTTCAACAGGTGAGCCACTGCT′] |
| 3329 | NM_024426.4(WT1): c.1391A > G | 7490 | WT1 | [′TGTCAGCGAAAGTTCTCCCGGTCCGRCCAC |
| | (p.Asp464Gly) | | | CTGAAGACCCACACCAGGACT′] |
| 3330 | NM_024426.4(WT1): c.1021A > G | 7490 | WT1 | [′TTGCAGCCACAGCACAGGGTACGAGRGCG |
| | (p.Ser341Gly) | | | ATAACCACACAACGCCCATCCT′] |
| 3331 | NM_005957.4(MTHFR): c.971A > G | 4524 | MTHFR | [′CCAGGCCTCCACTTCTACACCCTCARCCGC |
| | (p.Asn324Ser) | | | GAGATGGCTACCACAGAGGTG′] |
| 3332 | NM_001127328.2(ACADM): | 34 | ACADM | [′TAACTCATTCTAGCTAGTTCAACTTYCATT |
| | c.997A > G (p.Lys333Glu) | | | GCCATTTCAGCCAGCATAAAT′] |
| 3333 | NM_001127328.2(ACADM): | 34 | ACADM | [′TATTAATGGTCAGAAGATGTGGATARCCA |
| | c.589A > G (p.Thr197Ala) | | | ACGGAGGAAAAGCTAATTGGTA′] |
| 3334 | NM_000155.3(GALT): c.940A > G | 2592 | GALT | [′AGGATCAGAGGCTGGGGCCAACTGGRACC |
| | (p.Asn314Asp) | | | ATTGGCAGCTGCACGCTCATTA′] |
| 3335 | NM_000155.3(GALT): c.563A > G | 2592 | GALT | [′TGTTCTAACCCCCACCCCCACTGCCRGGTA |
| | (p.Gln188Arg) | | | AGGGTGTCAGGGGCTCCAGTG′] |
| 3336 | NM_000250.1(MPO): c.518A > G | 4353 | MPO | [′GTTGCACATCCCGGTGATGGTGCGGYATTT |
| | (p.Tyr173Cys) | | | GTCCTGCTCCGGGCAAGTCAC′] |
| 3337 | NM_020247.4(ADCK3): | 56997 | ADCK3 | [′TTGGATTTTGGGGCAACGCGGGAATRTGA |
| | c.1541A > G (p.Tyr514Cys) | | | CAGATCCTTCACCGACCTCTAC′] |
| 3338 | NM_000229.1(LCAT): c.463A > G | 3931 | LCAT | [′CACACTGGTGCAGAACCTGGTCAACRATG |
| | (p.Asn155Asp) | | | GCTACGTGCGGGACGAGACTGT′] |
| 3339 | NM_000403.3(GALE): c.101A > G | 2582 | GALE | [′GGCTACTTGCCTGTGGTCATCGATARCTTC |
| | (p.Asn34Ser) | | | CATAATGCCTTCCGTGGTGAG′] |
| 3340 | NM_001008216.1(GALE): | 2582 | GALE | [′GGCGAGTCGGTGCAGAAGCCTCTGGRTTA |
| | c.308A > G (p.Asp103Gly) | | | TTACAGAGTTAACCTGACCGGG′] |
| 3341 | NM_000403.3(GALE): c.770A > G | 2582 | GALE | [′AAGGGCCACATTGCAGCCTTAAGGARGCT |
| | (p.Lys257Arg) | | | GAAAGAACAGTGTGGCTGCCGG′] |
| 3342 | NM_000527.4(LDLR): c.2483A > G | 3949 | LDLR | [′AGCATCAACTTTGACAACCCCGTCTRTCAG |
| | (p.Tyr828Cys) | | | AAGACCACAGAGGATGAGGTC′] |
| 3343 | NM_024740.2(ALG9): c.860A > G | 79796 | ALG9 | [′ATTGCACCACTCAACATTGTTTTGTRTAAT |
| | (p.Tyr287Cys) | | | GTCTTTACTCCTCATGGACCT′] |
| 3344 | NM_000375.2(UROS): c.184A > G | 7390 | UROS | [′TGAAGATTACGGGGGACTCATTTTTRCCAG |
| | (p.Thr62Ala) | | | CCCCAGAGCAGTGGAAGCAGC′] |
| 3345 | NM_000372.4(TYR): c.125A > G | 7299 | TYR | [′GAATGCTGTCCACCGTGGAGCGGGGRCAG |
| | (p.Asp42Gly) | | | GAGTCCCTGTGGCCAGCTTTCA′] |
| 3346 | NM_000372.4(TYR): c.1A > G | 7299 | TYR | [′AGACCTTGTGAGGACTAGAGGAAGARTGC |
| | (p.Met1Val) | | | TCCTGGCTGTTTTGTACTGCCT′] |
| 3347 | NM_000053.3(ATP7B): | 540 | ATP7B | [′GTCGCCATGGTGGGGGATGGGGTCADTGA |
| | c.3809A > G (p.Asn1270Ser) | | | CTCCCCGGCCTTGGCCCAGGCA′] |
| 3348 | NM_000520.4(HEXA): c.1A > G | 3073 | HEXA | [′CTCCGAGAGGGGAGACCAGCGGGCCVTGA |
| | (p.Met1Val) | | | CAAGCTCCAGGCTTTGGTTTTC′] |
| 3349 | NM_000520.4(HEXA): c.611A > G | 3073 | HEXA | [′AATAAATTGAACGTGTTCCACTGGCRTCTG |
| | (p.His204Arg) | | | GTAGATGATCCTTCCTTCCCA′] |
| 3350 | NM_000356.3(TCOF1): c.149A > G | 6949 | TCOF1 | [′CAGCCCGTAACCCTTCTGGACATCTRTACA |
| | (p.Tyr50Cys) | | | CACTGGCAACAGTAAGTGGTG′] |
| 3351 | NM_000144.4(FXN): | 2395 | FXN | [′ATGCTTTTTTTCCACCTAATCCCCTRGAGT |
| | c.38 − 2A > G | | | GGTGTCTTAACTGTCAAACTG′] |
| 3352 | NM_016335.4(PRODH): | 5625 | PRODH | [′GCCTAGCAGCTGTCCAAAGTACACCYGGT |
| | c.1562A > G (p.Gln521Arg) | | | GGTCAGCAGGATGCAGGCCCAG′] |
| 3353 | NM_015474.3(SAMHD1): | 25939 | SAMHD1 | [′TAATTCTAATGGAATTAAGCCTGTCRTGGA |
| | c.760A > G (p.Met254Val) | | | ACAATATGGTCTCATCCCTGA′] |
| 3354 | NM_012464.4(TLL1): c.1885A > G | 7092 | TLL1 | [′ACTTCTTACCAAACTTAACGGCACCRTAAC |
| | (p.Ile629Val) | | | CACCCCTGGCTGGCCCAAGGA′] |
| 3355 | NM_000112.3(SLC26A2): | 1836 | SLC26A2 | [′GGAAATGTATGCCATTGGCTTTTGTRATAT |
| | c.1273A > G (p.Asn425Asp) | | | CATCCCTTCCTTCTTCCACTG′] |
| 3356 | NM_138691.2(TMC1): c.1960A > G | 117531 | TMC1 | [′CCTGTCCACAATGCCTGTCTTGTACRTGAT |
| | (p.Met654Val) | | | CGTGTCCCTCCCACCATCTTT′] |
| 3357 | NM_000173.6(GP1BA): c.763A > G | 2811 | GP1BA | [′GAAGCAAGGTGTGGACGTCAAGGCCRTGA |
| | (p.Met255Val) | | | CCTCTAATGTGGCCAGTGTGCA′] |
| 3358 | NM_024996.5(GFM1): c.521A > G | 85476 | GFM1 | [′AACGTTCCGTTTCTAACTTTTATTARCAAA |
| | (p.Asn174Ser) | | | TTGGACCGAATGGGCTCCAAC′] |
| 3359 | NM_024301.4(FKRP): c.926A > G | 79147 | FKRP | [′GTGGGCGACACGCCCGCCTACCTCTRCGA |
| | (p.Tyr309Cys) | | | GGAGCGCTGGACGCCCCCCTGC′] |
| 3360 | NM_024301.4(FKRP): c.1387A > G | 79147 | FKRP | [′TGCCGGCTTCGTGGCGCAGGCGCCTRACA |
| | (p.Asn463Asp) | | | ACTACCGCCGCTTCCTGGAGCT′] |
| 3361 | NM_021020.3(LZTS1): c.355A > G | 11178 | LZTS1 | [′TCCTTTTCCTCTACAGGGCTCCGAGRAGGG |
| | (p.Lys119Glu) | | | TGCAGTGAGGCCCACAGCCTT′] |
| 3362 | NM_001005741.2(GBA): | 2629 | GBA | [′CCAGCCGACCACATGGTACAGGAGGBTCT |
| | c.1226A > G (p.Asn409Ser) | | | AGGGTAAGGACAAAGGCAAAGA′] |
| 3363 | NM_000157.3(GBA): c.680A > G | 2629 | GBA | [′ACATCACCCACTTGGCTCAAGACCARTGG |
| | (p.Asn227Ser) | | | AGCGGTGAATGGGAAGGGGTCA′] |
| 3364 | NM_001005741.2(GBA): | 2629 | GBA | [′AAATATGTTCATGGCATTGCTGTACRTTGG |
| | c.1049A > G (p.His350Arg) | | | TACCTGGACTTTCTGGCTCCA′] |
| 3365 | NM_014239.3(EIF2B2): | 8892 | EIF2B2 | [′GTGAATTTGTCCAAAGCAGGTATTGRGAC |
| | c.638A > G (p.Glu213Gly) | | | AACTGTCATGACTGATGCTGCC′] |
| 3366 | NM_015915.4(ATL1): c.773A > G | 51062 | ATL1 | [′CTACAGAACGTCAGAAAACACATCCRTTC |
| | (p.His258Arg) | | | CTGTTTCACCAACATTTCCTGT′] |
| 3367 | NM_015915.4(ATL1): c.1222A > G | 51062 | ATL1 | [′GAAGCTATTCCGAGGGGTGAAGAAGRTGG |
| | (p.Met408Val) | | | GTGGGGAAGAATTTAGCCGGCG′] |
| 3368 | NM_022051.2(EGLN1): | 54583 | EGLN1 | [′TTCTGGTCTGACCGTCGCAACCCTCRTGAA |
| | c.1121A > G (p.His374Arg) | | | GTACAACCAGCATATGCTACA′] |
| 3369 | NM_015629.3(PRPF31): | 26121 | PRPF31 | [′GTCACCGCCTCCACCACCCAGGGGTRTGTC |
| | c.527 + 3A > G | | | CGCTTCGAGGGAGGCGCCGGG′] |
| 3370 | NM_001243133.1(NLRP3): | 114548 | NLRP3 | [′CTGCAGATCCAGCCCAGCCAGCTGGRATT |
| | c.1880A > G (p.Glu627Gly) | | | GTTCTACTGTTTGTACGAGATG′] |
| 3371 | NM_020919.3(ALS2): | 57679 | ALS2 | [′CTTATTGACGTTACTTTTTGCTCCTRGACA |
| | c.2980 − 2A > G | | | AAGTGGCTACGAGCTATAAGC′] |
| 3372 | NM_175073.2(APTX): c.602A > G | 54840 | APTX | [′GATAAATACCCAAAGGCCCGTTACCRTTG |
| | (p.His201Arg) | | | GCTGGTCTTACCGTGGACCTCC′] |
| 3373 | NM_001002010.2(NT5C3A): | 51251 | NT5C3A | [′CATCCCAATGTCAAAGTTGTGTCCARTTTT |
| | c.686A > G (p.Asn229Ser) | | | ATGGATTTTGATGAAACTGTA′] |
| 3374 | NM_020451.2(SEPN1): c.1A > G | 57190 | SEPN1 | [′CCGGCAGCCGCCGCCAGCCGCAGCCRTGG |
| | (p.Met1Val) | | | GCCGGGCCCGGCCGGGCCAACG′] |
| 3375 | NM_032667.6(BSCL2): c.263A > G | −1 | — | [′TCACTCTGCTCCTTCCCTGTTGCCARTGTCT |
| | (p.Asn88Ser) | | | CGCTGACTAAGGGTGGACGT′] |
| 3376 | NM_153638.2(PANK2): c.700A > G | 80025 | PANK2 | [′GGTATATTTTGAACCCAAAGACATCRCTGC |
| | (p.Thr234Ala) | | | TGAAGAAGAAGAGGAAGAAGT′] |
| 3377 | NM_025243.3(SLC19A3): | 80704 | SLC19A3 | [′TGCCTTGGTGATTCAGACCATCATGRCTGT |
| | c.1264A > G (p.Thr422Ala) | | | GATTGTAGTAGATCAGAGAGG′] |
| 3378 | NM_025243.3(SLC19A3): | 80704 | SLC19A3 | [′TATCCCATATTTATCTGGACCAGATRAAAA |
| | c.130A > G (p.Lys44Glu) | | | CCTGACCAGTGCAGAGGTAAG′] |
| 3379 | NM_031885.3(BBS2): c.209A > G | 583 | BBS2 | [′CAGACAGCTGACTGCCTGGTTAATGYTGA |
| | (p.Asn70Ser) | | | GAAGAGAAACATCAGATTCCAG′] |
| 3380 | NM_032383.4(HPS3): | −1 | — | [′TTTATGAGAAATTCTTTTATGTTTTRGATA |
| | c.2482 − 2A > G | | | AATGCCTGTAGTCATTATGGC′] |
| 3381 | NM_021830.4(C10orf2): | 56652 | C10orf2 | [′TGACCTTCGGTCCTGGGAAGCCGCCVAGTT |
| | c.955A > G (p.Lys319Glu) | | | GTTTGCACGAAAACTGAACCC′] |
| 3382 | NM_021830.4(C10orf2): | 56652 | C10orf2 | [′ACAATGCAACATGCAGTCTACGTCTRTGAC |
| | c.1523A > G (p.Tyr508Cys) | | | ATTTGTCATGTGATCATCGAC′] |
| 3383 | NM_006492.2(ALX3): c.608A > G | 257 | ALX3 | [′ACCTGCCCCCAGGTCTGGTTCCAGARCCGC |
| | (p.Asn203Ser) | | | AGAGCCAAGTGGCGGAAGCGC′] |
| 3384 | NM_174916.2(UBR1): c.407A > G | 197131 | UBR1 | [′TTCCAGGACAGTGTTCATAAAAATCRTCGT |
| | (p.His136Arg) | | | TACAAGGTAAGAAAATATAAC′] |
| 3385 | NM_015166.3(MLC1): c.422A > G | 23209 | MLC1 | [′CTAGTCCTGAACCCATCAGCAATAARCGT |
| | (p.Asn141Ser) | | | GAGTTCACACGAGCTTCGCGCA′] |
| 3386 | NM_013391.3(DMGDH): | 29958 | DMGDH | [′CCTGGAATAAACTTGAAGAAAATACRTTA |
| | c.326A > G (p.His109Arg) | | | TGATAGCATCAAACTTTATGAG′] |
| 3387 | NM_014795.3(ZEB2): c.3356A > G | 9839 | ZEB2 | [′GCTTACTTGCAGAGCATTACCCCTCRGGGG |
| | (p.Gln1119Arg) | | | TACTCTGACTCGGAGGAGAGG′] |
| 3388 | NM_000441.1(SLC26A4): | 5172 | SLC26A4 | [′GTTGTCATCCAGTCTCTTCCTTAGGRATTC |
| | c.1151A > G (p.Glu384Gly) | | | ATTGCCTTTGGGATCAGCAAC′] |
| 3389 | NM_000441.1(SLC26A4): | 5172 | SLC26A4 | [′TTATGCTATTGCAGTGTCAGTAGGARAAGT |
| | c.1105A > G (p.Lys369Glu) | | | ATATGCCACCAAGTATGATTA′] |
| 3390 | NM_000441.1(SLC26A4): | 5172 | SLC26A4 | [′AAGGACACATTCTTTTTGACGGTCCRTGAT |
| | c.2168A > G (p.His723Arg) | | | GCTATACTCTATCTACAGAAC′] |
| 3391 | NM_000441.1(SLC26A4): | 5172 | SLC26A4 | [′TTTTTAACATCTTTTGTTTTATTTCRGACGA |
| | c.919 − 2A > G | | | TAATTGCTACTGCCATTTCA′] |
| 3392 | NM_000197.1(HSD17B3): | 3293 | HSD17B3 | [′GACCCCATATGCTGTCTCGACTGCARTGAC |
| | c.703A > G (p.Met235Val) | | | AAAGTATCTAAATACAAATGT′] |
| 3393 | NM_000197.1(HSD17B3): | 3293 | HSD17B3 | [′TTGTTTTGCTTCTTTCTGCCAGTCARCAATG |
| | c.389A > G (p.Asn130Ser) | | | TCGGAATGCTTCCAAACCTT′] |
| 3394 | NM_022458.3(LMBR1): | 64327 | LMBR1 | [′GTTTTGATCTTAGTGTTTATTACAGRAAAT |
| | c.423 + 5252A > G | | | GAAGCCATATCTCACTAACTA′] |
| 3395 | NM_020366.3(RPGRIP1): | 57096 | RPGRIP1 | [′CTAAATAAACATTTTCCTTATCAGGRTTCA |
| | c.3341A > G (p.Asp1114Gly) | | | GAGAAGATGTGCATTGAAATT′] |
| 3396 | NM_021625.4(TRPV4): c.998A > G | 59341 | TRPV4 | [′CTGCATGCGCTGGTGGCCATTGCTGRCAAC |
| | (p.Asp333Gly) | | | ACCCGTGAGAACACCAAGTTT′] |
| 3397 | NM_004897.4(MINPP1): | 9562 | MINPP1 | [′TTAAAAAAAGTTGCAGCTACTTTGCRAGTG |
| | c.809A > G (p.Gln270Arg) | | | CCAGTAAATGATTTAAATGCA′] |
| 3398 | NM_020638.2(FGF23): c.211A > G | 8074 | FGF23 | [′TGGCGCACCCCATCAGACCATCTACRGTG |
| | (p.Ser71Gly) | | | AGTAGGGCTTCAGGCTGGGAAG′] |
| 3399 | NM_015071.4(ARHGAP26): | 23092 | ARHGAP26 | [′GGGCTGTATCGAATTGTGGGTGTCAVCTCC |
| | c.1250A > G (p.Asn417Ser) | | | AGAGTGCAGAAGTTGCTGAGT′] |
| 3400 | NM_021615.4(CHST6): c.521A > G | 4166 | CHST6 | [′CGCTCCTACAGCCACGTGGTGCTCARGGA |
| | (p.Lys174Arg) | | | GGTGCGCTTCTTCAACCTGCAG′] |
| 3401 | NM_021615.4(CHST6): c.329A > G | 4166 | CHST6 | [′TGCGACATGGACGTGTTTGATGCCTRTCTG |
| | (p.Tyr110Cys) | | | CCTTGGCGCCGCAACCTGTCC′] |
| 3402 | NM_015560.2(OPA1): c.1745A > G | 4976 | OPA1 | [′CTTGAAACTGAATGGAAGAATAACTRTCC |
| | (p.Tyr582Cys) | | | TCGCCTGCGGGAACTTGACCGG′] |
| 3403 | NM_000368.4(TSC1): c.1760A > G | 7248 | TSC1 | [′AGTATCTTCACTCCCAGTCCTTGTARAATT |
| | (p.Lys587Arg) | | | CCACCTCCGACGAGAGTGGGC′] |
| 3404 | NM_020661.2(AICDA): c.415A > G | 57379 | AICDA | [′CCGCGCCGGGGTGCAAATAGCCATCRTGA |
| | (p.Met139Val) | | | CCTTCAAAGGTGCGAAAGGGCC′] |
| 3405 | NM_020533.2(MCOLN1): | 57192 | MCOLN1 | [′ACAGGCCCTCCCCTTCTCTGCCCACRGTAC |
| | c.406 − 2A > G | | | CTGGCGTTGCCTGACGTGTCA′] |
| 3406 | NM_021102.3(SPINT2): | 10653 | SPINT2 | [′AGGAACTCCTGCAATAACTTCATCTRTGGA |
| | c.488A > G (p.Tyr163Cys) | | | GGCTGCCGGGGCAATAAGAAC′] |
| 3407- | NM_006610.3(MASP2): c.359A > G | 10747 | MASP2 | [′GGGAGGGCTGGGGTTTCTCAGGGTCRGGG |
| 3410 | (p.Asp120Gly) | | | GGTCCCCAAGGAGTAGCCAGGG′, |
| | | | | ′AGGGGCCAGGCTTGGCCAGGAGGGASATC |
| | | | | AGGCCTGGGTCTTGCCTTCACT′, |
| | | | | ′GGGCAGGAGAGCACAGACACGGAGCRGGC |
| | | | | CCCTGGCAAGGACACTTTCTAC′, |
| | | | | ′AGCCTGGACATTACCTTCCGCTCCGRCTAC |
| | | | | TCCAACGAGAAGCYGTTCACG′] |
| 3411 | NM_018965.3(TREM2): c.401A > G | 54209 | TREM2 | [′GCTCTGCCTCCCATAGACCCCCTGGRTCAC |
| | (p.Asp134Gly) | | | CGGGATGCTGGAGATCTCTGG′] |
| 3412 | NM_007375.3(TARDBP): | 23435 | TARDBP | [′AGCACTACAGAGCAGTTGGGGTATGRTGG |
| | c.1009A > G (p.Met337Val) | | | GCATGTTAGCCAGCCAGCAGAA′] |
| 3413 | NM_007375.3(TARDBP): | 23435 | TARDBP | [′GTAATGTCACAGCGACATATGATAGRTGG |
| | c.506A > G (p.Asp169Gly) | | | ACGATGGTGTGACTGCAAACTT′] |
| 3414 | NM_007375.3(TARDBP): | 23435 | TARDBP | [′GGTATGATGGGCATGTTAGCCAGCCRGCA |
| | c.1028A > G (p.Gln343Arg) | | | GAACCAGTCAGGCCCATCGGGT′] |
| 3415 | NM_007375.3(TARDBP): | 23435 | TARDBP | [′CGTTCATATATCCAATGCCGAACCTRAGCA |
| | c.787A > G (p.Lys263Glu) | | | CAATAGCAATAGACAGTTAGA′] |
| 3416 | NM_015247.2(CYLD): c.2240A > G | 1540 | CYLD | [′ATCAACAGTAACCTGAAATTTGCAGRGGT |
| | (p.Glu747Gly) | | | TAGTGATACTCACCTGTGGTAT′] |
| 3417 | NM_001128425.1(MUTYH): | 4595 | MUTYH | [′AATCAACTCTGGGCTGGCCTGGGCTRCTAT |
| | c.536A > G (p.Tyr179Cys) | | | TCTCGTGGCCGGCGGCTGCAG′] |
| 3418 | NM_001128425.1(MUTYH): | 4595 | MUTYH | [′TCCGTGACCTGGGAGCCCTCAGAGCRGCTT |
| | c.1241A > G (p.Gln414Arg) | | | CAGCGCAAGGCCCTGCTGCAG′] |
| 3419 | NM_170784.2(MKKS): c.110A > G | 8195 | MKKS | [′TTGAAAAGAATTGTAACATCATGCTRTGGC |
| | (p.Tyr37Cys) | | | CCCTCAGGTAGGCTGAAGCAG′] |
| 3420 | NM_170784.2(MKKS): c.169A > G | 8195 | MKKS | [′TGGCTTTGGAGGTTACGTGTGTACARCCTC |
| | (p.Thr57Ala) | | | ACAGTCCTCAGCTCTGCTCAG′] |
| 3421 | NM_004795.3(KL): c.578A > G | 9365 | KL | [′GTGCAGCCCGTGGTCACCCTGTACCRCTGG |
| | (p.His193Arg) | | | GACCTGCCCCAGCGCCTGCAG′] |
| 3422 | NM_014625.3(NPHS2): c.479A > G | 7827 | NPHS2 | [′CTTTTCTTTTTTTTGCCCTGCCTGGRTACCT |
| | (p.Asp160Gly) | | | ACCACAAGGTTGACCTTCGT′] |
| 3423 | NM_015713.4(RRM2B): | 50484 | RRM2B | [′CACCTCCTGACTAAAGCGCTCCACCBAAG |
| | c.322 − 2A > G | | | AAGATAAGGAAAATAGATATAT′] |
| 3424 | NM_006343.2(MERTK): | 10461 | MERTK | [′GAAGTATCTTTGTTTTCATTCACCCRGGAA |
| | c.1605 − 2A > G | | | TGCATTCACAGAGGAGGATTC′] |
| 3425 | NM_014585.5(SLC40A1): | 30061 | SLC40A1 | [′GCTACTGCAATCACAATCCAAAGGGRTTG |
| | c.470A > G (p.Asp157Gly) | | | GATTGTTGTTGTTGCAGGAGAA′] |
| 3426 | NM_004924.4(ACTN4): c.763A > G | 81 | ACTN4 | [′CGTGAACACGGCCCGGCCCGACGAGRAGG |
| | (p.Lys255Glu) | | | CCATAATGACCTATGTGTCCAG′] |
| 3427 | NM_012193.3(FZD4): c.1024A > G | −1 | — | [′CAAATGGGGTCATGAAGCCATTGAARTGC |
| | (p.Met342Val) | | | ACAGCTCTTATTTCCACATTGC′] |
| 3428 | NM_012193.3(FZD4): c.766A > G | −1 | — | [′GTTTTCCTACCCTGAGCGCCCCATCRTATT |
| | (p.Ile256Val) | | | TCTCAGTATGTGCTATAATAT′] |
| | NM_004239.3(TRIP11): | 9321 | TRIP11 | |
| | c.202 − 2A > G | | | |
| 3429 | NM_004239.3(TRIP11): | 9321 | TRIP11 | [′AGTGTTTTTTTCCAGAGAAAGCTGAYTGTT |
| | c.2102A > G (p.Asn701Ser) | | | ACCAGCAAGACATTCTTCTAA′] |
| 3430 | NM_012434.4(SLC17A5): | 26503 | SLC17A5 | [′CAGGGTGTTACATTTCCAGCCATGCRTGCC |
| | c.548A > G (p.His183Arg) | | | ATGTGGTCTTCTTGGGCTCCC′] |
| 3431 | NM_001099274.1(TINF2): | 26277 | TINF2 | [′ATGGGCCTCCACTAGGGGAGGCCATDAGG |
| | c.838A > G (p.Lys280Glu) | | | AGCGCCCCACAGTCATGCTGTT′] |
| 3432 | NM_012415.3(RAD54B): | 25788 | RAD54B | [′AGAGTTGAACAAAAGGCAGGGGTGAYTGC |
| | Gc.1778A > (p.Asn593Ser) | | | ACAGTTTTTTAAGAGCTCCTAT′] |
| 3433 | NM_014946.3(SPAST): | 6683 | SPAST | [′TAAGTGCCTGACTTTTATGTTTTACRGAAC |
| | c.1688 − 2A > G | | | TAAAACCAGAACAGGTGAAGA′] |
| 3434 | NM_014946.3(SPAST): | 6683 | SPAST | [′AGTCTTATACTTGTATTTCCTCTAGRTGAA |
| | c.1322A > G (p.Asp441Gly) | | | GTTGATAGCCTTTTGTGTGAA′] |
| 3435 | NM_014946.3(SPAST): | 6683 | SPAST | [′TGCAAGTTTAACTTCAAAATACGTGRGTGC |
| | c.1245 + 4A > G | | | TCTGTTTCCAATATTGTCGTA′] |
| 3436 | NM_014946.3(SPAST): | 6683 | SPAST | [′CTGTTACTCTTTGGTCCACCTGGGARTGGG |
| | c.1157A > G (p.Asn386Ser) | | | AAGACAATGCTGGTAAGGGTT′] |
| 3437 | NM_014946.3(SPAST): | 6683 | SPAST | [′AGAATCGAATGCAACCTTCTTTAATRTAAG |
| | c.1216A > G (p.Ile406Val) | | | TGCTGCAAGTTTAACTTCAAA′] |
| 3438 | NM_182643.2(DLC1): c.2875A > G | 10395 | DLC1 | [′ACACCTGGATGTGGACAACGACCGARCCA |
| | (p.Thr959Ala) | | | CACCCAGCGACCTGGACAGCAC′] |
| 3439 | NM_194456.1(KRIT1): c.410A > G | 889 | KRIT1 | [′TGCCCAATTTTTTACTGCTTACAAGRTATT |
| | (p.Asp137Gly) | | | ATGCGAGTCTGTAGTGAATCC′] |
| 3440 | NM_005094.3(SLC27A4): | 10999 | SLC27A4 | [′CCAGGAAACATCGTGGGAATCGGCCRGTG |
| | c.899A > G (p.Gln300Arg) | | | CCTGCTGCATGGCATGACGGTG′] |
| 3441 | NM_004211.3(SLC6A5): | 9152 | SLC6A5 | [′GGAGGCCTGATCACTCTCTCTTCTTRCAAC |
| | c.1472A > G (p.Tyr491Cys) | | | AAATTCCACAACAACTGCTAC′] |
| 3442 | NM_004211.3(SLC6A5): | 9152 | SLC6A5 | [′GACACTCTAATTGTCACCTGCACCARCAGT |
| | c.1526A > G (p.Asn509Ser) | | | GCCACAAGCATCTTTGCCGGC′] |
| 3443 | NM_014270.4(SLC7A9): | 11136 | SLC7A9 | [′GCGTTTTACAATGGACTCTGGGCCTRTGAT |
| | c.695A > G (p.Tyr232Cys) | | | GGATGGTGAGGTGTCCTGAGA′] |
| 3444 | NM_139025.4(ADAMTS13): | 11093 | ADAMTS13 | [′GAGCCTGTGTGTGTCGGGCAGCTGCRGGG |
| | c.1582A > G (p.Arg528Gly) | | | TAGGCGTGTGTGGACATTGGCG′] |
| 3445 | NM_002894.2(RBBP8): | 5932 | RBBP8 | [′TGTATTTGGAGCTACCTCTAGTATCRAAAG |
| | c.1009A > G (p.Lys337Glu) | | | TGGTTTAGATTTGAATACAAG′] |
| 3446 | NM_005682.6(ADGRG1): | 9289 | ADGRG1 | [′TCCTTCCCTGACCCCAGGGGCCTCTRCCAC |
| | Gc.263A > (p.Tyr88Cys) | | | TTCTGCCTCTACTGGAACCGA′] |
| 3447 | NM_006502.2(POLH): c.1603A > G | 5429 | POLH | [′AGGAACTGAGCCCTTCTTTAAGCAGRAAA |
| | (p.Lys535Glu) | | | GTCTGCTTCTAAAGCAGAAACA′] |
| 3448 | NM_000334.4(SCN4A): | 6329 | SCN4A | [′CATCTCCTTCCTCATCGTGGTCAACRTGTA |
| | c.4774A > G (p.Met1592Val) | | | CATCGCCATCATCCTGGAGAA′] |
| 3449 | NM_000334.4(SCN4A): | 6329 | SCN4A | [′CGCCCTCCTAGGCGCCATCCCCTCCRTCAT |
| | c.3478A > G (p.Ile1160Val) | | | GAATGTGCTGCTTGTCTGCCT′] |
| 3450 | NM_000334.4(SCN4A): c.421A > G | 6329 | SCN4A | [′GTTCAGCATGTTCATCATGATCACCRTCTT |
| | (p.Ile141 Val) | | | GACCAACTGCGTATTCATGAC′] |
| 3451 | NM_003907.2(EIF2B5): | 8893 | EIF2B5 | [′CCTGACTGCCACAGGTGTACAGGAARCAT |
| | c.271A > G (p.Thr91Ala) | | | TTGTCTTTTGTTGCTGGAAAGC′] |
| 3452 | NM_001128227.2(GNE): | 10020 | GNE | [′CAGTGCAGAGCAGCACCTGATATCCRTGT |
| | c.604A > G (p.Met202Val) | | | GTGAGGACCATGATCGCATCCT′] |
| 3453 | NM_001029.3(RPS26): c.1A > G | 6231 | RPS26 | [′CCTCTCTCCGGTCCGTGCCTCCAAGDTGGT |
| | (p.Met1Val) | | | GAGTCTTCTTGCGTGGTGAGG′] |
| 3454 | NM_012082.3(ZFPM2): | −1 | — | [′TCAAACTAAGAAGCTCTCCACCTCCRGTAA |
| | c.1969A > G (p.Ser657Gly) | | | CAATGATGACAAAATTAATGG′] |
| 3455 | NM_012082.3(ZFPM2): c.89A > G | 23414 | ZFPM2 | [′GATGAGGAAGAAGAATGTCCATCAGRGGA |
| | (p.Glu30Gly) | | | AACAGACATCATCTCCAAAGGA′] |
| 3456 | NM_012082.3(ZFPM2): | −1 | — | [′AAAGTGTTTATCTCAGTCTGAGCGGRCGAC |
| | c.2527A > G (p.Thr843Ala) | | | CACGTCTCCCAAAAGGCTGCT′] |
| 3457 | NM_194248.2(OTOF): | 9381 | OTOF | [′TCTGGCTCCCCCTTCTCCTGCCTGCRGGTC |
| | c.766 − 2A > G | | | AGCATCACGGTGATCGAGGCC′] |
| 3458 | NM_003705.4(SLC25A12): c.1769 | 8604 | SLC25A12 | [′GCTCGAGTGTTTCGATCCTCTCCCCRGTTT |
| | A > G (p.Gln590Arg) | | | GGTGTTACCTTGGTCACTTAT′] |
| 3459 | NM_004621.5(TRPC6): c.428A > G | 7225 | TRPC6 | [′AATGCCCTACAGTTGGCAGTGGCCARTGA |
| | (p.Asn143Ser) | | | GCATCTGGAAATTACAGAACTT′] |
| 3460 | NM_152384.2(BBS5): | 129880 | BBS5 | [′TTTGGAATTTATCCAGTGATCAGGTRTTGT |
| | c.522 + 3A > G | | | GCAAAGAGCTAGTGAACCTTT′] |
| 3461 | NM_152384.2(BBS5): c.547A > G | 129880 | BBS5 | [′GGGCAATTTAGGAACCTTTTTTATTRCCAA |
| | (p.Thr183Ala) | | | TGTGAGAATTGTGTGGCATGC′] |
| 3462 | NM_001257342.1(BCS1L): c.232A | 617 | BCS1L | [′CCACAGTACCCGTACTCAGCACCTCRGTGT |
| | > G (p.Ser78Gly) | | | CGAGACTTCGTACCTTCAGCA′] |
| 3463 | NM_004328.4(BCS1L): c.148A > G | 617 | BCS1L | [′GGCATTCCGGCGCCATTACATGATCRCACT |
| | (p.Thr50Ala) | | | GGAAGTCCCTGCTCGAGACAG′] |
| 3464 | NM_003839.3(TNFRSF11A): c.508 | 8792 | TNFRSF11 | [′TGCCTTTTCCTCCACGGACAAATGCRGACC |
| | A > G (p.Arg170Gly) | | A | CTGGACCAAGTAAGTAACAAC′] |
| 3465 | NM_030761.4(WNT4): c.647A > G | 54361 | WNT4 | [′TGCCACGGGGTGTCAGGCTCCTGTGRGGT |
| | (p.Glu216Gly) | | | AAAGACGTGCTGGCGAGCCGTG′] |
| 3466 | NM_022817.2(PER2): c.1984A > G | 8864 | PER2 | [′GCTGGCACTGCCGGGCAAGGCAGAGRGTG |
| | (p.Ser662Gly) | | | TGGCGTCGCTCACCAGCCAGTG′] |
| 3467 | NM_002977.3(SCN9A): | −1 | — | [′TAGGGCACGACCAATCAAATACACARGAA |
| | c.1964A > G (p.Lys655Arg) | | | AAGGCGTTGTAGTTCCTATCTC′] |
| 3468 | NM_002977.3(SCN9A): c.184A > G | 6335 | SCN9A | [′GGAAGCTGGCAAACAGCTGCCCTTCRTCT |
| | (p.Ile62Val) | | | ATGGGGACATTCCTCCCGGCAT′] |
| 3469 | NM_002977.3(SCN9A): c.29A > G | 6335 | SCN9A | [′GCAATGTTGCCTCCCCCAGGACCTCRGAGC |
| | (p.Gln10Arg) | | | TTTGTCCATTTCACAAAACAG′] |
| 3470 | NM_001457.3(FLNB): c.604A > G | 2317 | FLNB | [′GCCTGTGGATAATGCACGAGAAGCCRTGC |
| | (p.Met202Val) | | | AGCAGGCAGATGACTGGCTGGG′] |
| 3471 | NM_003060.3(SLC22A5): | 6584 | SLC22A5 | [′GTAGGCATGGGCCAGATCTCCAACTRTGT |
| | c.632A > G (p.Tyr211Cys) | | | GGCAGCATTTGTCCTGGGTATG′] |
| 3472 | NM_000369.2(TSHR): c.1856A > G | 7253 | TSHR | [′CCGCAGTACAACCCAGGGGACAAAGRTAC |
| | (p.Asp619Gly) | | | CAAAATTGCCAAGAGGATGGCT′] |
| 3473 | NM_000369.2(TSHR): c.548A > G | 7253 | TSHR | [′TCTCTTCTCTCTGTTGGTTGTAGGARGCTG |
| | (p.Lys183Arg) | | | TACAACAATGGCTTTACTTCA′] |
| 3474 | NM_001430.4(EPAS1): | 2034 | EPAS1 | [′GGAGACACTGGCACCCTATATCCCCRTGG |
| | c.1603A > G (p.Met535Val) | | | ACGGGGAAGACTTCCAGCTAAG′] |
| 3475 | NM_024009.2(GJB3): c.421A > G | 2707 | GJB3 | [′GTTCAGCCTCATCTTCAAGCTCATCRTTGA |
| | (p.Ile141Val) | | | GTTCCTCTTCCTCTACCTGCT′] |
| 3476 | NM_024009.2(GJB3): c.497A > G | 2707 | GJB3 | [′ATGCCGCGCCTGGTGCAGTGTGCCADCGT |
| | (p.Asn166Ser) | | | GGCCCCCTGCCCCAACATCGTG′] |
| 3477 | NM_001080463.1(DYNC2H1): | 79659 | DYNC2H1 | [′TGTTTTTTTGCTTTTGTAGGTTGCCRTGGGT |
| | c.11284A > G (p.Met3762Val) | | | CAAGGTCAAGCTGATTTAGC′] |
| 3478 | NM_001080463.1(DYNC2H1): | 79659 | DYNC2H1 | [′CGCATGCCACCTGATGTAATTAGAGRTATT |
| | c.9044A > G (p.Asp3015Gly) | | | CTTGAAGGAGTTTTAAGGTTG′] |
| 3479 | NM_001080463.1(DYNC2H1): | 79659 | DYNC2H1 | [′GTTGACCCATCTCTGTTCCCTTCACRGGTA |
| | c.4610A > G (p.Gln1537Arg) | | | AGGGGGCTTACGTGTAGAAGC′] |
| 3480 | NM_001080463.1(DYNC2H1): | 79659 | DYNC2H1 | [′TGGTCCAAGTGGTGCTGGAAAATCARCGC |
| | c.5959A > G (p.Thr1987Ala) | | | TTTGGAGAATGTTAAGGGCTGC′] |
| 3481 | NM_007035.3(KERA): c.740A > G | 11081 | KERA | [′GTGGCCTTTTTGAGACTAAATCACARCAAA |
| | (p.Asn247Ser) | | | CTGTCAGATGAGGGTCTCCCA′] |
| 3482 | NM_003722.4(TP63): c.697A > G | 8626 | TP63 | [′TATCCGCGCCATGCCTGTCTACAAARAAGC |
| | (p.Lys233Glu) | | | TGAGCACGTCACGGAGGTGGT′] |
| 3483 | NM_003722.4(TP63): c.1052A > G | 8626 | TP63 | [′CGGATCTGTGCTTGCCCAGGAAGAGRCAG |
| | (p.Asp351Gly) | | | GAAGGCGGATGAAGATAGCATC′] |
| 3484 | NM_003722.4(TP63): c.1054A > G | 8626 | TP63 | [′GATCTGTGCTTGCCCAGGAAGAGACRGGA |
| | (p.Arg352Gly) | | | AGGCGGATGAAGATAGCATCAG′] |
| 3485 | NM_003742.2(ABCB11): | 8647 | ABCB11 | [′AGAACAGTGGCTGCTTTTGGTGGTGRGAA |
| | c.890A > G (p.Glu297Gly) | | | AAGAGAGGTTGAAAGGTTGGTT′] |
| 3486 | NM_006702.4(PNPLA6): | 10908 | PNPLA6 | [′GGACCTCACGTACCCAGTCACCTCCRTGTT |
| | c.3034A > G (p.Met1012Val) | | | CACTGGGTCTGCCTTTAACCG′] |
| 3487 | NM_006412.3(AGPAT2): | 10555 | AGPAT2 | [′GTACACCACGGGGACGATGGGCACCYGCA |
| | c.589 − 2A > G | | | GGCAGGGAGACGCACAGCTGAG′] |
| 3488 | NM_001084.4(PLOD3): c.668A > G | 8985 | PLOD3 | [′AAGTCTCGGATCTTTCAGAACCTCARCGGG |
| | (p.Asn223Ser) | | | GCTTTAGGTGAGGAGGAAGAC′] |
| 3489 | NM_138554.4(TLR4): c.896A > G | 7099 | TLR4 | [′GCATACTTAGACTACTACCTCGATGRTATT |
| | (p.Asp299Gly) | | | ATTGACTTATTTAATTGTTTG′] |
| 3490 | NM_001130978.1(DYSF): | 8291 | DYSF | [′GGGCCAGGTGCAGGAGACATCAAGGRTCC |
| | c.3892A > G (p.Ile1298Val) | | | TGGATGAGGTGAGCTGGGCGTG′] |
| 3491 | NM_001130978.1(DYSF): | 8291 | DYSF | [′CTTTTTTGTCTTCTCTCTGGGGCAGRGGCT |
| | c.5264A > G (p.Glu1755Gly) | | | GGCAGGATCCCAAACCCACAC′] |
| 3492 | NM_003494.3(DYSF): | 8291 | DYSF | [′CAGCTCTTAACCACTCCAGCCACTCRCTCT |
| | c.3443 − 33A > G | | | GGCACCTCTGTTTTTTCCCTT′] |
| 3493 | NM_003494.3(DYSF): | 8291 | DYSF | [′AACTTGTCCCCTCCCTGTGTCTTCTRGCTGT |
| | c.1285 − 2A > G | | | GCAGCAAGATCTTGGAGAAG′] |
| 3494 | NM_005450.4(NOG): c.665A > G | 9241 | NOG | [′CGCTGCGGCTGGATTCCCATCCAGTRCCCC |
| | (p.Tyr222Cys) | | | ATCATTTCCGAGTGCAAGTGC′] |
| 3495 | NM_004629.1(FANCG): | 2189 | FANCG | [′GATACAATTTTTTTCTTTCTCTTTTRGGCCT |
| | c.925 − 2A > G | | | TGAATGTCCCATGCAGTTCC′] |
| 3496 | NM_001701.3(BAAT): c.226A > G | 570 | BAAT | [′AGGGGATTATATGGGAGTCCACCCCRTGG |
| | (p.Met76Val) | | | GTCTCTTCTGGTCTCTGAAACC′] |
| 3497 | NM_006892.3(DNMT3B): | 1789 | DNMT3B | [′TTTGGCTTTCCTGTGCACTACACAGRCGTG |
| | c.2450A > G (p.Asp817Gly) | | | TCCAACATGGGCCGTGGTGCC′] |
| 3498 | NM_001360.2(DHCR7): c.839A > G | 1717 | DHCR7 | [′GCTGCTTCTGTCTTGCAGGCCATCTRCGTG |
| | (p.Tyr280Cys) | | | ATTGACTTCTTCTGGAACGAA′] |
| 3499 | NM_001360.2(DHCR7): c.1A > G | 1717 | DHCR7 | [′AAGGTTCTCTTTCTTGCAGGGCCCARTGGC |
| | (p.Met1Val) | | | TGCAAAATCGCAACCCAACAT′] |
| 3500 | NM_032119.3(ADGRV1): | 84059 | ADGRV1 | [′TATCATCAGAGCATGTCACAGATCTRTGGA |
| | c.18131A > G (p.Tyr6044Cys) | | | CTCATTCATGGTGACCTGTAA′] |
| 3501 | NM_004984.2(KIF5A): c.767A > G | 3798 | KIF5A | [′GTGCTGGACGAGGCAAAGAATATCARCAA |
| | (p.Asn256Ser) | | | GTCACTGTCAGCTCTGGGCAAT′] |
| 3502 | NM_004984.2(KIF5A): c.827A > G | 3798 | KIF5A | [′GTCTCCTTCCTCCCCCAGAAAAGCTRTGTT |
| | (p.Tyr276Cys) | | | CCATATCGTGACAGCAAAATG′] |
| 3503 | NM_007373.3(SHOC2): c.4A > G | 8036 | SHOC2 | [′TTTTGTCCAGGCTTGAGTCACCATGRGTAG |
| | (p.Ser2Gly) | | | TAGTTTAGGAAAAGAAAAAGA′] |
| 3504 | NM_016203.3(PRKAG2): | 51422 | PRKAG2 | [′TACTCCTTGATCAAAAATAAAATCCRCAG |
| | c.1148A > G (p.His383Arg) | | | ATTGCCCGTTATTGACCCTATC′] |
| 3505 | NM_016203.3(PRKAG2): | 51422 | PRKAG2 | [′GTCCTGCTTTTCTCTTTGCAGGTCCRTCGG |
| | c.1589A > G (p.His530Arg) | | | CTGGTGGTGGTAAATGAAGCA′] |
| 3506 | NM_003816.2(ADAM9): | 8754 | ADAM9 | [′TTAAAATTTGTATACGTGTAATGCARCATT |
| | c.411 − 8A > G | | | CAGAGGATTGCTGCATTTAGA′] |
| 3507 | NM_003002.3(SDHD): c.341A > G | 6392 | SDHD | [′GGCCTTGGACAAGTTGTTACTGACTRTGTT |
| | (p.Tyr114Cys) | | | CATGGGGATGCCTTGCAGAAA′] |
| 3508 | NM_003002.3(SDHD): c.149A > G | 6392 | SDHD | [′GAATGGTGTGGAGTGCAGCACATACRCTT |
| | (p.His50Arg) | | | GTCACCGAGCCACCATTGTATG′] |
| 3509 | NM_003002.3(SDHD): c.1A > G | 6392 | SDHD | [′ATGACCTTGAGCCCTCAGGAACGAGDTGG |
| | (p.Met1Val) | | | CGGTTCTCTGGAGGCTGAGTGC′] |
| 3510 | NM_002485.4(NBN): c.511A > G | 4683 | NBN | [′TCAGTAAAATATTCTGGCTTTACAAYTGGA |
| | (p.Ile171Val) | | | CGTCCACAAATGAGTGCACAT′] |
| 3511 | NM_170695.3(TGIF1): c.838A > G | 7050 | TGIF1 | [′TTCCTGTACAGCTGGGCCAAACCCARCCCT |
| | (p.Thr280Ala) | | | AGGGAGGCCACTGTCTCCTAA′] |
| 3512 | NM_002408.3(MGAT2): c.785A > G | 4247 | MGAT2 | [′CTTATACTTTTCCTAGAAGAGGATCRCTAC |
| | (p.His262Arg) | | | TTAGCCCCAGACTTTTACCAT′] |
| 3513 | NM_002408.3(MGAT2): c.952A > G | 4247 | MGAT2 | [′GAAAACTTGGAAATCCACAGAGCACRATA |
| | (p.Asn318Asp) | | | TGGGTCTAGCCTTGACCCGGAA′] |
| 3514 | NM_005422.2(TECTA): | 7007 | TECTA | [′CAGTCCAATGGCACGCATATCATGTRTAA |
| | c.5609A > G (p.Tyr1870Cys) | | | AAACACACTCTGGATCGAAAGC′] |
| 3515 | NM_012233.2(RAB3GAP1): | 22930 | RAB3GAP1 | [′GGTATTGTCTTTGCATGTATTTCCTRGGGA |
| | c.649 − 2A > G | | | TGTCCTTTAACTCCATTGCCT′] |
| 3516 | NM_005025.4(SERPINI1): | 5274 | SERPINI1 | [′GAGATTTTTCTTTCCAAAGCAATTCRCAAG |
| | c.1013A > G (p.His338Arg) | | | TCCTTCCTAGAGGTTAATGAA′] |
| 3517 | NM_001040667.2(HSF4): | 3299 | HSF4 | [′AGACGGTTTTCGGAAGGTGGTGAGCRTCG |
| | c.256A > G (p.Ile86Val) | | | AGCAGGGCGGCCTGCTTAGGCC′] |
| 3518 | NM_001008211.1(OPTN): | 10133 | OPTN | [′GTTTACTGTTCTGATTTTCATGCTGRAAGA |
| | c.1433A > G (p.Glu478Gly) | | | GCAGCGAGAGAGAAAATTCAT′] |
| 3519 | NM_000492.3(CFTR): c.2738A > G | 1080 | CFTR | [′GTGATTATCACCAGCACCAGTTCGTRTTAT |
| | (p.Tyr913Cys) | | | GTGTTTTACATTTACGTGGGA′] |
| 3520 | NM_000492.3(CFTR): | 1080 | CFTR | [′CTCAATAAGTCCTGGCCAGAGGGTGRGAT |
| | c.3717 + 4A > G | | | TTGAACACTGCTTGCTTTGTTA′] |
| 3521 | NM_000492.3(CFTR): c.1666A > G | 1080 | CFTR | [′ACTGAGTGGAGGTCAACGAGCAAGARTTT |
| | (p.Ile556Val) | | | CTTTAGCAAGGTGAATAACTAA′] |
| 3522 | NM_000492.3(CFTR): c.326A > G | 1080 | CFTR | [′TTACTGGGAAGAATCATAGCTTCCTRTGAC |
| | (p.Tyr109Cys) | | | CCGGATAACAAGGAGGAACGC′] |
| 3523 | NM_000492.3(CFTR): | 1080 | CFTR | [′TGGAATCTTTTTATATTTAGGGGTARGGAT |
| | c.273 + 4A > G | | | CTCATTTGTACATTCATTATG′] |
| 3524 | NM_000492.3(CFTR): c.3254A > G | 1080 | CFTR | [′CTGTTCCACAAAGCTCTGAATTTACRTACT |
| | (p.His1085Arg) | | | GCCAACTGGTTCTTGTACCTG′] |
| 3525 | NM_000492.3(CFTR): c.3700A > G | 1080 | CFTR | [′CATATTAGAGAACATTTCCTTCTCANTAAG |
| | (p.Ile1234Val) | | | TCCTGGCCAGAGGGTGAGATT′] |
| 3526 | NM_000492.3(CFTR): c.650A > G | 1080 | CFTR | [′GCACTCCTCATGGGGCTAATCTGGGRGTTG |
| | (p.Glu217Gly) | | | TTACAGGCGTCTGCCTTCTGT′] |
| 3527 | NM_001005360.2(DNM2): | 1785 | DNM2 | [′CCTCCACCCTCAGGAGAAAGAGAAGRAGT |
| | c.1684A > G (p.Lys562Glu) | | | ACATGCTGCCTCTGGACAACCT′] |
| 3528 | NM_001814.4(CTSC): c.857A > G | 1075 | CTSC | [′TCTCAGACCCCAATCCTAAGCCCTCRGGAG |
| | (p.Gln286Arg) | | | GTTGTGTCTTGTAGCCAGTAT′] |
| 3529 | NM_001814.4(CTSC): c.1235A > G | 1075 | CTSC | [′AATCATGCTGTTCTGCTTGTGGGCTRTGGC |
| | (p.Tyr412Cys) | | | ACTGACTCAGCCTCTGGGATG′] |
| 3530 | NM_001814.4(CTSC): c.1040A > G | 1075 | CTSC | [′CGTTATTACTCCTCTGAGTACCACTRTGTA |
| | (p.Tyr347Cys) | | | GGAGGTTTCTATGGAGGCTGC′] |
| 3531 | NM_005144.4(HR): | 55806 | HR | [′TCCGACCCCTCCAACCTGCGGCCCTRGAGC |
| | c.−218A > G | | | GCCCCCGCCGCCCCGGGGGAA′] |
| 3532 | NM_172107.2(KCNQ2): c.851A > G | 3785 | KCNQ2 | [′ACCACCATTGGCTACGGGGACAAGTRCCC |
| | (p.Tyr284Cys) | | | CCAGACCTGGAACGGCAGGCTC′] |
| 3533 | NM_001303.3(COX10): | 1352 | COX10 | [′GCCCTGAGCTGGGGCCTCCGTGAAGDCTA |
| | c.1007A > G (p.Asp336Gly) | | | CTCCCGGGGCGGCTACTGCATG′] |
| 3534 | NM_006214.3(PHYH): | 5264 | PHYH | [′AGAACGTTATTATCCAGAGTATACCYAAA |
| | c.135 − 2A > G | | | GGAGAAAAAGAATCCCAAAATA′] |
| 3535 | NM_002284.3(KRT86): c.340A > G | −1 | — | [′GGAGAAGGAGCAGATCAAGTCCCTCVACA |
| | (p.Asn114Asp) | | | GCAGGTTCGCGGCCTTCATCGA′] |
| 3536 | NM_003865.2(HESX1): c.541A > G | 8820 | HESX1 | [′TCTAATGGCGAAAAAAAATTTCAACRCAA |
| | (p.Thr181Ala) | | | ATCTGCTGGAATAGATAGAAAA′] |
| 3537 | NM_000303.2(PMM2): c.563A > G | 5373 | PMM2 | [′TTTGATGTCTTTCCTGATGGATGGGRCAAG |
| | (p.Asp188Gly) | | | AGATACTGTCTGCGACATGTG′] |
| 3538 | NM_000288.3(PEX7): | 5191 | PEX7 | [′TCTTTTGCTTTCTAAACACTTTTCARTGTTT |
| | c.340 − 10A > G | | | TTAGGTGTATAGTGTTGATT′] |
| 3539 | NM_004044.6(ATIC): c.1277A > G | 471 | ATIC | [′CTCATCGTAGCCACCATTGCTGTCARGTAC |
| | (p.Lys426Arg) | | | ACTCAGTCTAACTCTGTGTGC′] |
| 3540 | NM_000314.6(PTEN): c.368A > G | 5728 | PTEN | [′GATGACAATCATGTTGCAGCAATTCRCTGT |
| | (p.His123Arg) | | | AAAGCTGGAAAGGGACGAACT′] |
| 3541 | NM_000314.6(PTEN): c.278A > G | 5728 | PTEN | [′GTTGCACAATATCCTTTTGAAGACCRTAAC |
| | (p.His93Arg) | | | CCACCACAGCTAGAACTTATC′] |
| 3542 | NM_000314.6(PTEN): c.755A > G | 5728 | PTEN | [′CCTCAGCCGTTACCTGTGTGTGGTGRTATC |
| | (p.Asp252Gly) | | | AAAGTAGAGTTCTTCCACAAA′] |
| 3543 | NM_018488.2(TBX4): c.1592A > G | 9496 | TBX4 | [′TCCTTGTCCCGAGAATCTTCCTTACRGTAC |
| | (p.Gln531Arg) | | | CATTCAGGAATGGGGACTGTG′] |
| 3544 | NM_000223.3(KRT12): c.403A > G | 3859 | KRT12 | [′AGAAACTATGCAAAATCTTAATGATRGAT |
| | (p.Arg135Gly) | | | TAGCTTCCTACCTGGATAAGGT′] |
| 3545 | NM_000503.5(EYA1): c.1639A > G | 2138 | EYA1 | [′TGAGAGAATAATTCAAAGGTTTGGARGAA |
| | (p.Arg547Gly) | | | AAGTGGTGTATGTTGTTATAGG′] |
| 3546 | NM_000261.1(MYOC): c.1010A > G | 4653 | MYOC | [′GTGTACTCGGGGAGCCTCTATTTCCRGGGC |
| | (p.Gln337Arg) | | | GCTGAGTCCAGAACTGTCATA′] |
| 3547 | NM_000261.1(MYOC): c.1267A > G | 4653 | MYOC | [′ACAAACCTGGGAGACAAACATCCGTRAGC |
| | (p.Lys423Glu) | | | AGTCAGTCGCCAATGCCTTCAT′] |
| 3548 | NM_000474.3(TWIST1): | 7291 | TWIST1 | [′GACCCTCAAGCTGGCGGCCAGGTACRTCG |
| | c.466A > G (p.Ile156Val) | | | ACTTCCTCTACCAGGTCCTCCA′] |
| 3549 | NM_001089.2(ABCA3): | 21 | ABCA3 | [′ACAGATCACCGTCCTGCTGGGCCACRACG |
| | c.1702A > G (p.Asn568Asp) | | | GTGCCGGGAAGACCACCACCCT′] |
| 3550 | NM_005055.4(RAPSN): | 5913 | RAPSN | [′ATTCCTCAGAGGCCATGTGGCCCCARCTGG |
| | c.−210A > G | | | CAGCGACAGCTGCAGACGGGC′] |
| 3551 | NM_198217.2(ING1): c.515A > G | 3621 | ING1 | [′AACGAACCCACGTACTGTCTGTGCARCCA |
| | (p.Asn172Ser) | | | GGTCTCCTATGGGGAGATGATC′] |
| 3552 | NM_000430.3(PAFAH1B1): | 5048 | PAFAH1B1 | [′GATTTTGAACGAACTCTTAAAGGACRTAC |
| | c.446A > G (p.His149Arg) | | | AGACTCTGTACAGGACATTTCA′] |
| 3553 | NM_000579.3(CCR5): | −1 | — | [′TACGGGGAGAGTGGAGAAAAAGGGGRCA |
| | c.−301 + 246A > G | | | CAGGGTTAATGTGAAGTCCAGGA′] |
| 3554 | NM_000264.3(PTCH1): | −1 | — | [′ACTTTACGACCTACACAGGAGTTTCRGTAA |
| | c.2479A > G (p.Ser827Gly) | | | CGTGAAGTATGTCATGTTGGA′] |
| 3555 | NM_001184.3(ATR): c.2022A > G | 545 | ATR | [′TCTGCTGCTGCAATAAGATAAAAAAYCCA |
| | (p.Gly674=) | | | CTAACACAACTAGCCCGGATTA′] |
| 3556 | NM_005982.3(SIX1): c.386A > G | 6495 | SIX1 | [′ATCTGGGACGGCGAGGAGACCAGCTRCTG |
| | (p.Tyr129Cys) | | | CTTCAAGGAGAAGTCGAGGGGT′] |
| 3557 | NM_006267.4(RANBP2): | 5903 | RANBP2 | [′AGAAGACGCACACATAACTTTTGCTRTATT |
| | Gc.1966A > (p.Ile656Val) | | | GGATGCAGTAAATGGAAATAT′] |
| 3558 | NM_001001557.2(GDF6): | 392255 | GDF6 | [′CCGCCCAGCTGCTGCGTGCCCACCARATTG |
| | c.1271A > G (p.Lys424Arg) | | | ACTCCCATCAGCATTCTATAC′] |
| 3559 | NM_000557.4(GDF5): c.517A > G | 8200 | GDF5 | [′ACCCCCCATCACACCCCACGAGTACVTGCT |
| | (p.Met173Val) | | | CTCGCTGTACAGGACGCTGTC′] |
| 3560 | NM_000392.4(ABCC2): | 1244 | ABCC2 | [′CGAGAGAAGCTGACCATCATCCCCCRGGT |
| | c.4145A > G (p.Gln1382Arg) | | | GAGCTCTAGAACTTACTCGGGC′] |
| 3561 | NM_000396.3(CTSK): c.990A > G | 1513 | CTSK | [′ACCTGGCCAGCTTCCCCAAGATGTGRCTCC |
| | (p.Ter330Trp) | | | AGCCAGCCAAATCCATCCTGC′] |
| 3562 | NM_001127221.1(CACNA1A): | 773 | CACNA1A | [′AACGTCTTCAACATCCTCATCGTCTRCATG |
| | c.4151A > G (p.Tyr1384Cys) | | | CTATTCATGTTCATCTTCGCC′] |
| 3563 | NM_000178.2(GSS): c.656A > G | 2937 | GSS | [′CAAGAGAAGGAAAGAAACATATTTGRCCA |
| | (p.Asp219Gly) | | | GCGTGCCATAGAGAATGAGCTA′] |
| 3564 | NM_000901.4(NR3C2): | 4306 | NR3C2 | [′ACGCTCAACCGCTTAGCAGGCAAACRGAT |
| | c.2327A > G (p.Gln776Arg) | | | GATCCAAGTCGTGAAGTGGGCA′] |
| 3565 | NM_000901.4(NR3C2): | 4306 | NR3C2 | [′ATCAGCGACCAGCTGCCCAAGGTGGRGTC |
| | c.2915A > G (p.Glu972Gly) | | | GGGGAACGCCAAGCCGCTCTAC′] |
| 3566 | NM_004407.3(DMP1): c.1A > G | 1758 | DMP1 | [′CCAGGTAGAGGTATCACACCCAACTRTGA |
| | (p.Met1Val) | | | AGATCAGCATCCTGCTCATGTT′] |
| 3567 | NM_004999.3(MYO6): c.737A > G | 4646 | MYO6 | [′CAAGGCAAAGAGGAAAGAAATTATCRTAT |
| | (p.His246Arg) | | | CTTTTATAGGTTGTGTGCTGGT′] |
| 3568 | NM_000256.3(MYBPC3): | 4607 | MYBPC3 | [′CGCCAGCAACAAGTACGGCCTGGCCRCAG |
| | c.175A > G (p.Thr59Ala) | | | AGGGCACACGGCATACGCTGAC′] |
| 3569 | NM_000163.4(GHR): c.594A > G | 2690 | GHR | [′TGGAGTATGAACTTCAATACAAAGARGTA |
| | (p.Glu198=) | | | AATGAAACTAAATGGAAAATGG′] |
| 3570 | NM_000525.3(KCNJ11): | 3767 | KCNJ11 | [′ATCATGCTTGGCTGCATCTTCATGARGACT |
| | c.509A > G (p.Lys170Arg) | | | GCCCAAGCCCACCGCAGGGCT′] |
| 3571 | NM_000525.3(KCNJ11): | 3767 | KCNJ11 | [′CTGGTGGCCCCGCTGATCATCTACCRTGTC |
| | c.776A > G (p.His259Arg) | | | ATTGATGCCAACAGCCCACTC′] |
| 3572 | NM_000182.4(HADHA): | 3030 | HADHA | [′GAAAAAAACTGCAAATTAAATGAGAYACC |
| | c.180 + 3A > G | | | TTTGAATTGGGAGAGTTAATTC′] |
| 3573 | NM_005263.3(GFI1): c.1145A > G | 2672 | GFI1 | [′GGCAAGGCATTCAGCCAGAGCTCCARCCT |
| | (p.Asn382Ser) | | | CATCACCCACAGCCGCAAACAC′] |
| 3574 | NM_005263.3(GFI1): c.1208A > G | 2672 | GFI1 | [′CCCTTCGGCTGCGACCTCTGTGGGARGGGT |
| | (p.Lys403Arg) | | | TTCCAGAGGAAGGTGGACCTC′] |
| 3575 | NM_001893.4(CSNK1D): | 1453 | CSNK1D | [′TGCCATCAAGCTTGAATGTGTCAAARCCA |
| | c.130A > G (p.Thr44Ala) | | | AACACCCTCAGCTCCACATTGA′] |
| 3576 | NM_006204.3(PDE6C): | 5146 | PDE6C | [′AAACAGAAAGGACATTGCTCAGGAARTGC |
| | c.1363A > G (p.Met455Val) | | | TCATGAACCAAACCAAAGCCAC′] |
| 3577 | NM_006204.3(PDE6C): | 5146 | PDE6C | [′TGAAACAACCCATCCTTATTTCAACRGAAA |
| | c.1483 − 2A > G | | | GAGGACTTGCCAGACCCACGC′] |
| 3578 | NM_003476.4(CSRP3): c.206A > G | 8048 | CSRP3 | [′TGCTATGGGCGCAGATATGGCCCCARAGG |
| | (p.Lys69Arg) | | | GATCGGGTATGGACAAGGCGCT′] |
| 3579 | NM_005591.3(MRE11A): | 4361 | MRE11A | [′GTGAACTATCAAGATGGCAACCTCARCAT |
| | c.350A > G (p.Asn117Ser) | | | TTCAATTCCAGTGTTTAGTATT′] |
| 3580 | NM_000107.2(DDB2): c.730A > G | 1643 | DDB2 | [′TTGGAATCTCAGAATGCACAAAAAGRAAG |
| | (p.Lys244Glu) | | | TGACGCATGTGGCCCTGAACCC′] |
| 3581 | NM_001204.6(BMPR2): | 659 | BMPR2 | [′AAGGAGACAATCGAAGACTGTTGGGRCCA |
| | c.1454A > G (p.Asp485Gly) | | | GGATGCAGAGGCTCGGCTTACT′] |
| 3582 | NM_000336.2(SCNN1B): | 6338 | SCNN1B | [′ACAGAGAAGGCACTTCCTTCGGCCARCCC |
| | Gc.863A > (p.Asn288Ser) | | | TGGAACTGAATTCGGTGAGTTT′] |
| 3583 | NM_000447.2(PSEN2): c.715A > G | 5664 | PSEN2 | [′CTACCTCATCATGATCAGTGCGCTCRTGGC |
| | (p.Met239Val) | | | CCTAGTGTTCATCAAGTACCT′] |
| 3584 | NM_002181.3(IHH): c.284A > G | 3549 | IHH | [′CCAGACATCATCTTCAAGGACGAGGRGAA |
| | (p.Glu95Gly) | | | CACAGGCGCCGACCGCCTCATG′] |
| 3585 | NM_000310.3(PPT1): c.236A > G | 5538 | PPT1 | [′ACTTCTCTCTGGCTTCTTTTTTAGGRCGTGG |
| | (p.Asp79Gly) | | | AGAACAGCTTCTTCTTGAAT′] |
| 3586 | NM_003051.3(SLC16A1): | 6566 | SLC16A1 | [′GCGACCAATCGGGCCCAAGCCAACCRAGG |
| | c.610A > G (p.Lys204Glu) | | | CAGGGAAAGATAAGTCTAAAGC′] |
| 3587 | NM_005587.2(MEF2A): c.788A > G | 4205 | MEF2A | [′TCTCCCCCTCCACCAGGTGGTGGTARTCTT |
| | (p.Asn263Ser) | | | GGAATGAACAGTAGGAAACCA′] |
| 3588 | NM_000098.2(CPT2): c.638A > G | 1376 | CPT2 | [′TACCTGGTCAATGCGTATCCCCTGGRTATG |
| | (p.Asp213Gly) | | | TCCCAGTATTTTCGGCTTTTC′] |
| 3589 | NM_000098.2(CPT2): c.359A > G | 1376 | CPT2 | [′TTTTTAGGACCCTGGTTTGATATGTRCCTA |
| | (p.Tyr120Cys) | | | TCTGCTCGAGACTCCGTTGTT′] |
| 3590 | NM_001079668.2(NKX2-1): | 7080 | NKX2-1 | [′TCGCCGGGCCCATGAAGCGGGAGACHGTA |
| | c.464 − 2A > G | | | AGCGACAAACGCACAGCGTCGG′] |
| 3591 | NM_004387.3(NKX2-5): | 1482 | NKX2-5 | [′AACTTCGTGAACTTCGGCGTCGGGGRCTTG |
| | c.896A > G (p.Asp299Gly) | | | AATGCGGTTCAGAGCCCCGGG′] |
| 3592 | NM_004387.3(NKX2-5): | 1482 | NKX2-5 | [′GCTGAAACTCACGTCCACGCAGGTCRAGA |
| | c.547A > G (p.Lys183Glu) | | | TCTGGTTCCAGAACCGGCGCTA′] |
| 3593 | NM_178138.4(LHX3): c.332A > G | 8022 | LHX3 | [′GTGCGCCGCGCCCAGGACTTCGTGTRCCAC |
| | (p.Tyr111Cys) | | | CTGCACTGCTTTGCCTGCGTC′] |
| 3594 | NM_001698.2(AUH): | 549 | AUH | [′CTTGTACTTTTTTTCCCCTTTAACTRGGAAT |
| | c.263 − 2A > G | | | TGTGGTGCTTGGAATAAACA′] |
| 3595 | NM_001698.2(AUH): | 549 | AUH | [′ACATATTTAATATTTTGTTTTTCTTRGACCA |
| | c.943 − 2A > G | | | TTCCAACAAAAGACAGACTT′] |
| 3596 | NM_001876.3(CPT1A): | 1374 | CPT1A | [′ATGTGTGTTTCACGTAGGTGGTTTGRCAAG |
| | c.1361A > G (p.Asp454Gly) | | | TCGTTCACGTTTGTTGTCTTC′] |
| 3597 | NM_001876.3(CPT1A): | 1374 | CPT1A | [′CGGCTGCTGAAGCCCCGGGAGATGGRGCA |
| | c.1079A > G (p.Glu360Gly) | | | GCAGATGCAGAGGATCCTGGAC′] |
| 3598 | NM_001876.3(CPT1A): | 1374 | CPT1A | [′TCCATTGACAGCCTCCAGCTGGGCTRTGCG |
| | c.1493A > G (p.Tyr498Cys) | | | GAGGATGGGCACTGCAAAGGC′] |
| 3599 | NM_000352.4(ABCC8): | 6833 | ABCC8 | [′CACCCTGCGCTCACGCCTCTCCATCRTCCT |
| | c.4270A > G (p.Ile1424Val) | | | GCAGGACCCCGTCCTCTTCAG′] |
| 3600 | NM_000352.4(ABCC8): c.215A > G | 6833 | ABCC8 | [′ACATGGCTTCATTTCCCTGGGCACARCCTG |
| | (p.Asn72Ser) | | | CGGTGGATCCTGACCTTCATG′] |
| 3601 | NM_002180.2(IGHMBP2): | 3508 | IGHMBP2 | [′TCTCAGAAAGAACTTGCCATCATCCRTGGA |
| | c.638A > G (p.His213Arg) | | | CCTCCTGGCACTGGGAAAACC′] |
| 3602 | NM_033163.3(FGF8): c.298A > G | 2253 | FGF8 | [′GAAGCACGTGCAGGTCCTGGCCAACRAGC |
| | (p.Lys100Glu) | | | GCATCAACGCCATGGCAGAGGA′] |
| 3603 | NM_006180.4(NTRK2): | 4915 | NTRK2 | [′TCCCGGGACGTGTACAGCACTGACTRCTAC |
| | c.2165A > G (p.Tyr722Cys) | | | AGGGTGAGTAGCTGTGCAGAT′] |
| 3604 | NM_033028.4(BBS4): | 585 | BBS4 | [′TCAGAAGCATTTTTCTCCCTCTTTCRGGCT |
| | c.157 − 2A > G | | | GTTATCAAAGAACAGCTTCAA′] |
| 3605 | NM_000409.3(GUCA1A): | 2978 | GUCA1A | [′AAGCTCCGCTGGTACTTCAAGCTCTRTGAT |
| | c.296A > G (p.Tyr99Cys) | | | GTAGATGGCAACGGCTGCATT′] |
| 3606 | NM_000344.3(SMN1): c.815A > G | 6606 | SMN1 | [′TTAATTTCATGGTACATGAGTGGCTRTCAT |
| | (p.Tyr272Cys) | | | ACTGGCTATTATATGGTAAGT′] |
| 3607 | NM_000344.3(SMN1): c.784A > G | 6606 | SMN1 | [′TCTTGATGATGCTGATGCTTTGGGARGTAT |
| | (p.Ser262Gly) | | | GTTAATTTCATGGTACATGAG′] |
| 3608 | NM_000095.2(COMP): c.1358A > G | 1311 | COMP | [′CGGGACAACTGTCCCACGGTGCCTARCAG |
| | (p.Asn453Ser) | | | TGCCCAGGAGGACTCAGACCAC′] |
| 3609 | NM_000095.2(COMP): c.1418A > G | 1311 | COMP | [′GGTGATGCCTGCGACGACGACGACGRCAA |
| | (p.Asp473Gly) | | | TGACGGAGTCCCTGACAGTCGG′] |
| 3610 | NM_002047.2(GARS): c.374A > G | 2617 | GARS | [′GATATTGTAGACCGAGCAAAAATGGRAGA |
| | (p.Glu125Gly) | | | TACCCTGAAGAGGAGGTTTTTC′] |
| 3611 | NM_001166107.1(HMGCS2): | 3158 | HMGCS2 | [′GGCATAGATACCACCAATGCCTGCTRCGG |
| | c.500A > G (p.Tyr167Cys) | | | TGGTACTGCCTCCCTCTTCAAT′] |
| 3612 | NM_000161.2(GCH1): c.671A > G | 2643 | GCH1 | [′CGAGGTGTACAGAAAATGAACAGCARAAC |
| | (p.Lys224Arg) | | | TGTGACCAGCACAATGTTGGGT′] |
| 3613 | NM_001024630.3(RUNX2): | 860 | RUNX2 | [′ATCTGCAGGCAAGAGTTTCACCTTGRCCAT |
| | c.598A > G (p.Thr200Ala) | | | AACCGTCTTCACAAATCCTCC′] |
| 3614 | NM_000423.2(KRT2): c.556A > G | 3849 | KRT2 | [′AGAGCGTGAGCAGATCAAAACTCTCDACA |
| | (p.Asn186Asp) | | | ACAAATTTGCCTCCTTCATTGA′] |
| 3615 | NM_000215.3(JAK3): c.299A > G | 3718 | JAK3 | [′GATGCCAGCACCCAAGTCCTGCTGTRCAG |
| | (p.Tyr100Cys) | | | GATTCGGTAGGAAGTGCCCCCC′] |
| 3616 | NM_000335.4(SCN5A): | 6331 | SCN5A | [′CTCTGTCCACTTGAGGTGGTGGTCARTGCC |
| | c.3971A > G (p.Asn1324Ser) | | | CTGGTGGGCGCCATCCCGTCC′] |
| 3617 | NM_000335.4(SCN5A) | 6331 | SCN5A | [′AGTGAGGACGACTTCGATATGTTCTRTGAG |
| | c.5381A > G (p.Tyr1794Cys) | | | ATCTGGGAGAAATTTGACCCA′] |
| 3618 | NM_001014797.2(KCNMA1): | 3778 | KCNMA1 | [′AAGGACTTTCTGCACAAGGACCGGGRTGA |
| | c.1301A > G (p.Asp434Gly) | | | CGTCAATGTGGAGATCGTTTTT′] |
| 3619 | NM_004380.2(CREBBP): | 1387 | CREBBP | [′TATAATCGCAAGACATCCCGAGTCTRTAA |
| | c.3524A > G (p.Tyr1175Cys) | | | GTTTTGCAGTAAGCTTGCAGAG′] |
| 3620 | NM_000023.2(SGCA): c.410A > G | 6442 | SGCA | [′GGCCCCCTGCTGCCATACCAAGCCGRGTTC |
| | (p.Glu137Gly) | | | CTGGTGCGCAGCCACGATGCG′] |
| 3621 | NM_002835.3(PTPN12): | 5782 | PTPN12 | [′GGAGAAAAAGAAGAAAATGTTAAAARGA |
| | c.182A > G (p.Lys61Arg) | | | ACAGATACAAGGACATACTGCCA′] |
| 3622 | NM_000211.4(ITGB2): | 3689 | ITGB2 | [′GGGGAGCTGTCTGAGGACTCCAGCARTGT |
| | c.1052A > G (p.Asn351Ser) | | | GGTCCAACTCATTAAGAATGCT′] |
| 3623 | NM_005502.3(ABCA1): | 19 | ABCA1 | [′GTCTGGGGGGGCTTCGCCTACTTGCRGGAT |
| | c.1790A > G (p.Gln597Arg) | | | GTGGTGGAGCAGGCAATCATC′] |
| 3624 | NM_005502.3(ABCA1): | 19 | ABCA1 | [′CAGATCACCTCCTTCCTGGGCCACARTGGA |
| | c.2804A > G (p.Asn935Ser) | | | GCGGGGAAGACGACCACCATG′] |
| 3625 | m.5843A > G | 4579 | MT-TY | [′CTCGGAGCTGGTAAAAAGAGGCCTARCCC |
| | | | | CTGTCTTTAGATTTACAGTCCA′] |
| 3626 | m.7445A > G | −1 | — | [′AAGAACCCGTATACATAAAATCTAGVCAA |
| | | | | AAAAGGAAGGAATCGAACCCCC′] |
| 3627 | m.8344A > G | 4566 | MT-TK | [′ACCTTTTAAGTTAAAGATTAAGAGARCCA |
| | | | | ACACCTCTTTACAGTGAAATGC′] |
| 3628 | m.8296A > G | 4566 | MT-TK | [′ACCCCCTCTACCCCCTCTAGAGCCCRCTGT |
| | | | | AAAGCTAACTTAGCATTAACC′] |
| 3629 | m.12320A > G | 4568 | MT-TL2 | [′TCTTAGGCCCCAAAAATTTTGGTGCRACTC |
| | | | | CAAATAAAAGTAATAACCATG′] |
| 3630 | m.3243A > G | 4567 | MT-TL1 | [′AGAACAGGGTTTGTTAAGATGGCAGRGCC |
| | | | | CGGTAATCGCATAAAACTTAAA′] |
| 3631 | m.3252A > G | 4567 | MT-TL1 | [′TTTGTTAAGATGGCAGAGCCCGGTARTCGC |
| | | | | ATAAAACTTAAAACTTTACAG′] |
| 3632 | m.3251A > G | 4567 | MT-TL1 | [′GTTTGTTAAGATGGCAGAGCCCGGTRATC |
| | | | | GCATAAAACTTAAAACTTTACA′] |
| 3633 | m.3260A > G | 4567 | MT-TL1 | [′GATGGCAGAGCCCGGTAATCGCATARAAC |
| | | | | TTAAAACTTTACAGTCAGAGGT′] |
| 3634 | m.3274A > G | 4567 | MT-TL1 | [′GTAATCGCATAAAACTTAAAACTTTRCAGT |
| | | | | CAGAGGTTCAATTCCTCTTCT′] |
| 3635 | m.4317A > G | 4565 | MT-TI | [′GATAGAGTAAATAATAGGAGCTTAARCCC |
| | | | | CCTTATTTCTAGGACTATGAGA′] |
| 3636 | m.4269A > G | 4565 | MT-TI | [′GCATTCCCCCTCAAACCTAAGAAATRTGTC |
| | | | | TGATAAAAGAGTTACTTTGAT′] |
| 3637 | m.4295A > G | 4565 | MT-TI | [′TGTCTGATAAAAGAGTTACTTTGATRGAGT |
| | | | | AAATAATAGGAGCTTAAACCC′] |
| 3638 | m.4300A > G | 4565 | MT-TI | [′GATAAAAGAGTTACTTTGATAGAGTRAAT |
| | | | | AATAGGAGCTTAAACCCCCTTA′] |
| 3639 | m.10044A > G | 4563 | MT-TG | [′CTTCCAATTAACTAGTTTTGACAACRTTCA |
| | | | | AAAAAGAGTAATAAACTTCGC′] |
| 3640 | m.7526A > G | 4555 | MT-TD | [′TCCATGACTTTTTCAAAAAGGTATTRGAAA |
| | | | | AACCATTTCATAACTTTGTCA′] |
| 3641 | m.10438A > G | 4573 | MT-TR | [′AGTTTAAACAAAACGAATGATTTCGRCTC |
| | | | | ATTAAATTATGATAATCATATT′] |
| 3642 | m.1555A > G | 4549 | MT-RNR1 | [′ACCCCTACGCATTTATATAGAGGAGRCAA |
| | | | | GTCGTAACATGGTAAGTGTACT′] |
| 3643 | m.827A > G | 4549 | MT-RNR1 | [′CACCCCCACGGGAAACAGCAGTGATNARC |
| | | | | CTTTAGCAATAAACGAAAGTTT′] |
| 3644 | m.15579A > G | 4519 | MT-CYB | [′CCCGAATGATATTTCCTATTCGCCTRCACA |
| | | | | ATTCTCCGATCCGTCCCTAAC′] |
| 3645 | m.14495A > G | 4541 | MT-ND6 | [′TCCAAAGACAACCATCATTCCCCCTRAATA |
| | | | | AATTAAAAAAACTATTAAACC′] |
| 3646 | m.12770A > G | 4540 | MT-ND5 | [′CTATTCCAACTGTTCATCGGCTGAGRGGGC |
| | | | | GTAGGAATTATATCCTTCTTG′] |
| 3647 | m.11084A > G | 4538 | MT-ND4 | [′CTCCCTACAAATCTCCTTAATTATARCATT |
| | | | | CACAGCCACAGAACTAATCAT′] |
| 3648 | m.3397A > G | 4535 | MT-ND1 | [′TACCGAACGAAAAATTCTAGGCTATRTAC |
| | | | | AACTACGCAAAGGCCCCAACGT′] |
| 3649 | m.4136A > G | 4535 | MT-ND1 | [′CTGTTCTTATGAATTCGAACAGCATRCCCC |
| | | | | CGATTCCGCTACGACCAACTC′] |
| 3650 | m.3796A > G | 4535 | MT-ND1 | [′CCGTTTACTCAATCCTCTGATCAGGNTGAG |
| - | | | | CATCAAACTCAAACTACGCCC′, |
| 3654 | | | | ′AATAAGTGGCTCCTTTAACCTCTCCDCCCTT |
| | | | | ATCACAACACAAGAACACCT′, |
| | | | | ′ACCCCCTTGACCTTGCCGAAGGGGANTCCG |
| | | | | AACTAGTCTCAGGCTTCAACA′, |
| | | | | ′CGAATACGCCGCAGGCCCCTTCGCCNTATT |
| | | | | CTTCATAGCCGAATACACAAA′, |
| | | | | ′ATTTTGTCACCAAGACCCTACTTCTNACCTC |
| | | | | CCTGTTCTTATGAATTCGAA′] |
| 3655 | NM_003334.3(UBA1): c.1639A > G | 7317 | UBA1 | [′AATGAATCCACATATCCGGGTGACARGCC |
| | (p.Ser547Gly) | | | ACCAGAACCGTGTGGGTCCTGA′] |
| 3656 | NM_000354.5(SERPINA7): | 6906 | SERPINA7 | [′GATCAAAAGGATTTGCCCACTGGGCYTAA |
| | c.623 − 2A > G | | | AATACAAAGAAAAGAGAGGTGT′] |
| 3657 | NM_000044.3(AR): c.2291A > G | 367 | AR | [′ACCAATGTCAACTCCAGGATGCTCTRCTTC |
| | (p.Tyr764Cys) | | | GCCCCTGATCTGGTTTTCAAT′] |
| 3658 | NM_000044.3(AR): c.2362A > G | 367 | AR | [′CCGGATGTACAGCCAGTGTGTCCGARTGA |
| | (p.Met788Val) | | | GGCACCTCTCTCAAGAGTTTGG′] |
| 3659 | NM_000044.3(AR): c.2632A > G | 367 | AR | [′GATTGCGAGAGAGCTGCATCAGTTCRCTTT |
| | (p.Thr878Ala) | | | TGACCTGCTAATCAAGTCACA′] |
| 3660 | NM_000044.3(AR): c.2708A > G | 367 | AR | [′ATGATGGCAGAGATCATCTCTGTGCRAGT |
| | (p.Gln903Arg) | | | GCCCAAGATCCTTTCTGGGAAA′] |
| 3661 | NM_002764.3(PRPS1): c.341A > G | 5631 | PRPS1 | [′CCAATCTCAGCCAAGCTTGTTGCAARTATG |
| | (p.Asn114Ser) | | | CTATCTGTAGCAGGTGCAGAT′] |
| 3662 | NM_000194.2(HPRT1): c.602A > G | 3251 | HPRT1 | [′CTTGACTATAATGAATACTTCAGGGRTTTG |
| | (p.Asp201Gly) | | | AATGTAAGTAATTGCTTCTTT′] |
| 3663 | NM_000194.2(HPRT1): c.155A > G | 3251 | HPRT1 | [′TGTAGGACTGAACGTCTTGCTCGAGRTGTG |
| | (p.Asp52Gly) | | | ATGAAGGAGATGGGAGGCCAT′] |
| 3664 | NM_000132.3(F8): c.872A > G | 2157 | F8 | [′CCTGAAGTGCACTCAATATTCCTCGRAGGT |
| | (p.Glu291Gly) | | | CACACATTTCTTGTGAGGAAC′] |
| 3665 | NM_000132.3(F8): c.5183A > G | 2157 | F8 | [′GCTGCAGTGGAGAGGCTCTGGGATTRTGG |
| | (p.Tyr1728Cys) | | | GATGAGTAGCTCCCCACATGTT′] |
| 3666 | NM_000132.3(F8): c.5821A > G | 2157 | F8 | [′TTCTCTGTGTCCTTCTCCAGCAATCRATGG |
| | (p.Asn1941Asp) | | | CTACATAATGGATACACTACC′] |
| 3667 | NM_000132.3(F8): c.328A > G | 2157 | F8 | [′TACAGTGGTCATTACACTTAAGAACRTGGC |
| | (p.Met110Val) | | | TTCCCATCCTGTCAGTCTTCA′] |
| 3668 | NM_000132.3(F8): c.398A > G | 2157 | F8 | [′TTTCTTCCTGCTATAGGAGCTGAATRTGAT |
| | (p.Tyr133Cys) | | | GATCAGACCAGTCAAAGGGAG′] |
| 3669 | NM_000132.3(F8): c.404A > G | 2157 | F8 | [′CCTGCTATAGGAGCTGAATATGATGRTCA |
| | (p.Asp135Gly) | | | GACCAGTCAAAGGGAGAAAGAA′] |
| 3670 | NM_000132.3(F8): c.940A > G | 2157 | F8 | [′GGAAATCTCGCCAATAACTTTCCTTRCTGC |
| | (p.Thr314Ala) | | | TCAAACACTCTTGATGGACCT′] |
| 3671 | NM_000132.3(F8): c.1226A > G | 2157 | F8 | [′TGGGTACATTACATTGCTGCTGAAGRGGA |
| | (p.Glu409Gly) | | | GGACTGGGACTATGCTCCCTTA′] |
| 3672 | NM_000132.3(F8): c.1331A > G | 2157 | F8 | [′CAGCGGATTGGTAGGAAGTACAAAARAGT |
| | (p.Lys444Arg) | | | CCGATTTATGGCATACACAGAT′] |
| 3673 | NM_000132.3(F8): c.1418A > G | 2157 | F8 | [′TCAGGAATCTTGGGACCTTTACTTTRTGGG |
| | (p.Tyr473Cys) | | | GAAGTTGGAGACACACTGTTG′] |
| 3674 | NM_000132.3(F8): c.1660A > G | 2157 | F8 | [′TCGGTGCCTGACCCGCTATTACTCTRGTTT |
| | (p.Ser554Gly) | | | CGTTAATATGGAGAGAGATCT′] |
| 3675 | NM_000132.3(F8): c.1682A > G | 2157 | F8 | [′TCTAGTTTCGTTAATATGGAGAGAGRTCTA |
| | (p.Asp561Gly) | | | GCTTCAGGACTCATTGGCCCT′] |
| 3676 | NM_000132.3(F8): c.1892A > G | 2157 | F8 | [′GAGGATCCAGAGTTCCAAGCCTCCARCAT |
| | (p.Asn631Ser) | | | CATGCACAGTGAGTAAAGCAGC′] |
| 3677 | NM_000132.3(F8): c.5600A > G | 2157 | F8 | [′TTCCCTCCCTAGGAAAAAGATGTGCRCTCA |
| | (p.His1867Arg) | | | GGCCTGATTGGACCCCTTCTG′] |
| 3678 | NM_000132.3(F8): c.5822A > G | 2157 | F8 | [′TCTCTGTGTCCTTCTCCAGCAATCARTGGC |
| | (p.Asn1941Ser) | | | TACATAATGGATACACTACCT′] |
| 3679 | NM_000132.3(F8): c.6113A > G | 2157 | F8 | [′AGCACACTTTTTCTGGTGTACAGCARTAGT |
| | (p.Asn2038Ser) | | | GAGTAGCAATGTGGGCAGAGG′] |
| 3680 | NM_000132.3(F8): c.6278A > G | 2157 | F8 | [′AAGTGTTATTTTAATTGGTAGGTGGRTCTG |
| | (p.Asp2093Gly) | | | TTGGCACCAATGATTATTCAC′] |
| 3681 | NM_000132.3(F8): c.6371A > G | 2157 | F8 | [′TACATCTCTCAGTTTATCATCATGTRTAGT |
| | | | | CTTGATGGGAAGAAGTGGCAG′] |
| 3682 | NM_000132.3(F8): c.6794A > G | 2157 | F8 | [′ATGAAAGTCACAGGAGTAACTACTCRGGG |
| | (p.Gln2265Arg) | | | AGTAAAATCTCTGCTTACCAGC′] |
| 3683 | NM_000132.3(F8): c.104A > G | 2157 | F8 | [′GGTGCAGTGGAACTGTCATGGGACTRTAT |
| | (p.Tyr35Cys) | | | GCAAAGTGATCTCGGTGAGCTG′] |
| 3684 | NM_000402.4(G6PD): c.466A > G | 2539 | G6PD | [′CAACTCCTATGTGGCTGGCCAGTACRATGA |
| | (p.Asn156Asp) | | | TGCAGCCTCCTACCAGCGCCT′] |
| 3685 | NM_000402.4(G6PD): c.583A > G | 2539 | G6PD | [′GCTCCGGGCTCCCAGCAGAGGCTGGRACC |
| | (p.Asn195Asp) | | | GCATCATCGTGGAGAAGCCCTT′] |
| 3686 | NM_002049.3(GATA1): c.653A > G | 2623 | GATA1 | [′ACAGCCACTCCACTGTGGCGGAGGGRCAG |
| | (p.Asp218Gly) | | | GACAGGCCACTACCTATGCAAC′] |
| 3687 | NM_001097642.2(GJB1): | 2705 | GJB1 | [′CAGCCTGGCTGCAACAGCGTTTGCTRTGAC |
| | c.194A > G (p.Tyr65Cys) | | | CAATTCTTCCCCATCTCCCAT′] |
| 3688 | NM_000166.5(GJB1): c.614A > G | 2705 | GJB1 | [′GCCTCTGGCATCTGCATCATCCTCARTGTG |
| | (p.Asn205Ser) | | | GCCGAGGTGGTGTACCTCATC′] |
| 3689 | NM_000032.4(ALAS2): | 212 | ALAS2 | [′CCGTCCTGTACACTTTGAGCTCATGRGTGA |
| | c.1702A > G (p.Ser568Gly) | | | GTGGGAACGTTCCTACTTCGG′] |
| 3690 | NM_000202.6(IDS): c.404A > G | 3423 | IDS | [′GGCTATGTGACCATGTCGGTGGGAARAGT |
| | (p.Lys135Arg) | | | CTTTCACCCTGGTACTGCTCCA′] |
| 3691 | NM_000292.2(PHKA2): c.896A > G | 5256 | PHKA2 | [′TATGGATGCTGTCGCTTCCTTCGAGRTGGT |
| | (p.Asp299Gly) | | | TATAAAACTCCAAGAGAGGTT′] |
| 3692 | NM_000292.2(PHKA2): c.565A > G | 5256 | PHKA2 | [′TTATGGAATGTGGGAGCGTGGAGATRAGA |
| | (p.Lys189Glu) | | | CTAATCAGGGCATCCCGGAATT′] |
| 3693 | NM_000351.4(STS): c.1331A > G | 412 | STS | [′CGCTCCGATCATGAGTTTCTCTTCCRTTAC |
| | (p.His444Arg) | | | TGCAACGCCTACTTAAATGCT′] |
| 3694 | NM_000133.3(F9): c.278A > G | 2158 | F9 | [′TTCAATTTCTTAACCTATCTCAAAGRTGGA |
| | (p.Asp93Gly) | | | GATCAGTGTGAGTCCAATCCA′] |
| 3695 | NM_000133.3(F9): c.329A > G | 2158 | F9 | [′TGTTTAAATGGCGGCAGTTGCAAGGRTGA |
| | (p.Asp110Gly) | | | CATTAATTCCTATGAATGTTGG′] |
| 3696 | NM_000133.3(F9): c.917A > G | 2158 | F9 | [′CGAATTATTCCTCACCACAACTACARTGCA |
| | (p.Asn306Ser) | | | GCTATTAATAAGTACAACCAT′] |
| 3697 | NM_000133.3(F9): c.1180A > G | 2158 | F9 | [′TACAAAGTTCACCATCTATAACAACRTGTT |
| | (p.Met394Val) | | | CTGTGCTGGCTTCCATGAAGG′] |
| 3698 | NM_000133.3(F9): c.1231A > G | 2158 | F9 | [′AGGTAGAGATTCATGTCAAGGAGATRGTG |
| | (p.Ser411Gly) | | | GGGGACCCCATGTTACTGAAGT′] |
| 3699 | NM_000266.3(NDP): c.131A > G | 4693 | NDP | [′CCTCGACGCTGCATGAGGCACCACTRTGTG |
| | (p.Tyr44Cys) | | | GATTCTATCAGTCACCCATTG′] |
| 3700 | NM_000266.3(NDP): c.1A > G | 4693 | NDP | [′TCTAGAGAAGTTTTTCCTTACAACARTGAG |
| | (p.Met1Val) | | | AAAACATGTACTAGCTGCATC′] |
| 3701 | NM_000266.3(NDP): c.125A > G | 4693 | NDP | [′TCGGACCCTCGACGCTGCATGAGGCRCCA |
| | (p.His42Arg) | | | CTATGTGGATTCTATCAGTCAC′] |
| 3702 | NM_000169.2(GLA): c.886A > G | −1 | — | [′GGCTATCATGGCTGCTCCTTTATTCRTGTC |
| | (p.Met296Val) | | | TAATGACCTCCGACACATCAG′] |
| 3703 | NM_000169.2(GLA): c.101A > G | −1 | — | [′ATCCCTGGGGCTAGAGCACTGGACARTGG |
| | (p.Asn34Ser) | | | ATTGGCAAGGACGCCTACCATG′] |
| 3704 | NM_000169.2(GLA): c.644A > G | −1 | — | [′GAGTCATATCTGTTTTCACAGCCCARTTAT |
| | (p.Asn215Ser) | | | ACAGAAATCCGACAGTACTGC′] |
| 3705 | NM_000169.2(GLA): c.1228A > G | −1 | — | [′AAGGTTAAGAAGTCACATAAATCCCRCAG |
| | (p.Thr410Ala) | | | GCACTGTTTTGCTTCAGCTAGA′] |
| 3706 | NM_000169.2(GLA): c.815A > G | −1 | — | [′TCTTTTTCTCAGTTAGTGATTGGCARCTTTG |
| | (p.Asn272Ser) | | | GCCTCAGCTGGAATCAGCAA′] |
| 3707 | NM_153252.4(BRWD3): | 254065 | BRWD3 | [′AGAAGATAAAGAGAAAAAAGAAACARAA |
| | c.4786A > G (p.Lys1596Glu) | | | GAGAAATCTCATTTATCCACCTC′] |
| 3708 | NM_004463.2(FGD1): c.1396A > G | 2245 | FGD1 | [′GCAGAAACTGGCCCCCTTCCTCAAGRTGTA |
| | (p.Met466Val) | | | TGGTGAGTATGTGAAGAACTT′] |
| 3709 | NM_000054.4(AVPR2): c.614A > G | 554 | AVPR2 | [′GCGGAGCCCTGGGGCCGTCGCACCTRTGT |
| | (p.Tyr205Cys) | | | CACCTGGATTGCCCTGATGGTG′] |
| 3710 | NM_000054.4(AVPR2): c.839A > G | 554 | AVPR2 | [′ATGACGCTAGTGATTGTGGTCGTCTRTGTG |
| | (p.Tyr280Cys) | | | CTGTGCTGGGCACCCTTCTTC′] |
| 3711 | NM_000276.3(OCRL): c.1436A > G | 4952 | OCRL | [′ATCAAGTTCATCCCCACTTATAAGTRTGAC |
| | (p.Tyr479Cys) | | | TCTAAAACAGACCGGTGGGAT′] |
| 3712 | NM_000397.3(CYBB): c.302A > G | 1536 | CYBB | [′CAACTGGACAGGAATCTCACCTTTCRTAAA |
| | (p.His101Arg) | | | ATGGTGGCATGGATGATTGCA′] |
| 3713 | NM_000397.3(CYBB): c.1499A > G | 1536 | CYBB | [′GCTGTGCACCATGATGAGGAGAAAGRTGT |
| | (p.Asp500Gly) | | | GATCACAGGCCTGAAACAAAAG′] |
| 3714 | NM_001205019.1(GK): c.880A > G | 2710 | GK | [′TGGAACAGGATGTTTCTTACTATGTRATAC |
| | (p.Asn294Asp) | | | AGGCCATAAGGTTGGTTTTTT′] |
| 3715 | NM_005710.2(PQBP1): c.194A > G | 10084 | PQBP1 | [′CGGCCCCACAGCGGGCTCCCTTACTRCTGG |
| | (p.Tyr65Cys) | | | AATGCAGACACAGACCTTGTA′] |
| 3716 | NM_198270.3(NHS): | 4810 | NHS | [′CTGAACCTGATTGTACTTTGTTTGCRGTCC |
| | c.853 − 2A > G | | | CATCCCCCAGAGGATGAAGAT′] |
| 3717 | NM_000252.2(MTM1): c.566A > G | 4534 | MTM1 | [′CACCATTGGAGAATAACTTTTATTARTAAG |
| | (p.Asn189Ser) | | | TGCTATGAGCTCTGTGACACT′] |
| 3718 | NM_000252.2(MTM1): c.1190A > G | 4534 | MTM1 | [′GCCATGCTGATGTTGGATAGCTTCTRTAGG |
| | (p.Tyr397Cys) | | | AGCATTGAAGGGTTCGAAATA′] |
| 3719 | NM_000252.2(MTM1): | 4534 | MTM1 | [′TAATTAAAACAAATTATCTTCATCARTTTA |
| | c.1261 − 10A > G | | | TTCAGCGAATAGGTCATGGTG′] |
| 3720 | NM_001015877.1(PHF6): | 84295 | PHF6 | [′AGGAAAACTGCATATATTTAATGCCRAGA |
| | c.700A > G (p.Lys234Glu) | | | AGGCAGCTGCCCATTATAAGTG′] |
| 3721 | NM_001015877.1(PHF6): | 84295 | PHF6 | [′GAAAATGAAGCACGAGGAAAACTGCRTAT |
| | c.686A > G (p.His229Arg) | | | ATTTAATGCCAAGAAGGCAGCT′] |
| 3722 | NM_001015877.1(PHF6): | 84295 | PHF6 | [′CACAGTCCAGCTCACAACAACATCARGAG |
| | c.769A > G (p.Arg257Gly) | | | CAGAATTTGGAGACTTTGATAT′] |
| 3723 | NM_000117.2(EMD): c.1A > G | 2010 | EMD | [′GCCTCCGCCTGAGCCCGCACCCGCCRTGG |
| | (p.Met1Val) | | | ACAACTACGCAGATCTTTCGGA′] |
| 3724 | NM_004006.2(DMD): c.2317A > G | 1756 | DMD | [′GGCCATAGAGCGAGAAAAAGCTGAGRAGT |
| | (p.Lys773Glu) | | | TCAGAAAACTGCAAGATGCCAG′] |
| 3725 | NM_004006.2(DMD): c.8734A > G | 1756 | DMD | [′TCTACGAAAGCAGGCTGAGGAGGTCRATA |
| | (p.Asn2912Asp) | | | CTGAGTGGGAAAAATTGAACCT′] |
| 3726 | NM_004006.2(DMD): c.8762A > G | 1756 | DMD | [′ACTGAGTGGGAAAAATTGAACCTGCRCTC |
| | (p.His2921Arg) | | | CGCTGACTGGCAGAGAAAAATA′] |
| 3727 | NM_004006.2(DMD): c.835A > G | 1756 | DMD | [′TCCCCCAAACCCTTCTCTGCAGATCRCGGT |
| | (p.Thr279Ala) | | | CAGTCTAGCACAGGGATATGA′] |
| 3728 | NM_004006.2(DMD): | 1756 | DMD | [′TCGATCGCACTTCAGTTATGATAAAYTGAC |
| | c.9225 − 285A > G | | | CTTGTTATGTGATCAATAATC′] |
| 3729 | NM_000033.3(ABCD1): c.443A > G | 215 | ABCD1 | [′ATCGCCCTCCCTGCTACCTTCGTCARCAGT |
| | (p.Asn148Ser) | | | GCCATCCGTTACCTGGAGGGC′] |
| 3730 | NM_003588.3(CUL4B): | 8450 | CUL4B | [′TTTGATTTCTTTTTTTTTCATTGGCRGATCA |
| | c.901 − 2A > G | | | TGATCAGGAGCATTTTTTTG′] |
| 3731 | NM_000061.2(BTK): c.1288A > G | 695 | BTK | [′GAGAGGCCAGTACGACGTGGCCATCRAGA |
| | (p.Lys430Glu) | | | TGATCAAAGAAGGCTCCATGTC′] |
| 3732 | NM_000061.2(BTK): c.1082A > G | 695 | BTK | [′AGCACCATCCCTGAGCTCATTAACTRCCAT |
| | (p.Tyr361Cys) | | | CAGCACAACTCTGCAGGTGAG′] |
| 3733 | NM_000061.2(BTK): c.919A > G | 695 | BTK | [′GGGGAAAGAAGGAGGTTTCATTGTCRGAG |
| | (p.Arg307Gly) | | | ACTCCAGCAAAGCTGGCAAATA′] |
| 3734 | NM_000061.2(BTK): c.1766A > G | 695 | BTK | [′CACCTTCTAGGGGTTTTGATGTGGGRAATT |
| | (p.Glu589Gly) | | | TACTCCCTGGGGAAGATGCCA′] |
| 3735 | NM_003413.3(ZIC3): c.1213A > G | 7547 | ZIC3 | [′CTACACGCACCCGAGCTCCCTGCGCRAAC |
| | (p.Lys405Glu) | | | ACATGAAGGTAATTACCTCTTT′] |
| 3736 | NM_001037811.2(HSD17B10): | 3028 | HSD17B10 | [′GCCATCATCGAGAACCCATTCCTCARTGGA |
| | c.713A > G (p.Asn238Ser) | | | GAGGTCATCCGGCTGGATGGG′] |
| 3737 | NM_003639.4(IKBKG): | 8517 | IKBKG | [′CAAGTGCCAGTATCAGGCCCCTGATRTGG |
| | c.1219A > G (p.Met407Val) | | | ACACCCTGCAGATACATGTCAT′] |
| 3738 | NM_003639.4(IKBKG): | 8517 | IKBKG | [′ATACATGTCATGGAGTGCATTGAGTRGGG |
| | c.1259A > G (p.Ter420Trp) | | | CCGGCCAGTGCAAGGCCACTGC′] |
| 3739 | NM_005448.2(BMP15): c.704A > G | 9210 | BMP15 | [′TTGGACATTGCCTTCTTGTTACTCTRTTTCA |
| | (p.Tyr235Cys) | | | ATGATACTCATAAAAGCATT′] |
| 3740 | NM_005120.2(MED12): | 9968 | MED12 | [′AAGGTGAAGAACACCATCTACTGCARCGT |
| | c.3020A > G (p.Asn1007Ser) | | | GGAGCCATCGGAATCAAATATG′] |
| 3741 | NM_003688.3(CASK): c.2129A > G | 8573 | CASK | [′GGCAAGAAAAAGAAGCAGTACAAAGRTA |
| | (p.Asp710Gly) | | | AATATTTGGCAAAGCACAATGCA′] |
| 3742 | NM_001363.4(DKC1): c.361A > G | 1736 | DKC1 | [′ACTTCGGGTGGAGAAGACAGGGCACRGTG |
| | (p.Ser121Gly) | | | GTACTCTGGATCCCAAGGTGAC′] |
| 3743 | NM_001363.4(DKC1): c.1069A > G | 1736 | DKC1 | [′ATTAATGACCACAGCGGTCATCTCTRCCTG |
| | (p.Thr357Ala) | | | CGACCATGGTATAGTAGCCAA′] |
| 3744 | NM_000307.4(POU3F4): | 5456 | POU3F4 | [′GTTCTGTAATCGAAGACAAAAAGAGRAAA |
| | c.1000A > G (p.Lys334Glu) | | | GAATGACTCCGCCAGGGGATCA′] |
| 3745 | NM_004429.4(EFNB1): c.472A > G | 1947 | EFNB1 | [′GGGCGGTGTGTGCCGCACACGCACCRTGA |
| | (p.Met158Val) | | | AGATCATCATGAAGGTTGGGCA′] |
| 3746 | NM_000489.4(ATRX): c.4826A > G | 546 | ATRX | [′TTCTTATAGGTGGTAAGTTTTCTTCRTACA |
| | (p.His1609Arg) | | | GTTCTTTTGTGTGACAAACTG′] |
| 3747 | NM_000489.4(ATRX): c.5579A > G | 546 | ATRX | [′TTCTTTTGATCAGGTGTGGGCAATAVTAGT |
| | (p.Asn1860Ser) | | | GAAGGTGGAAGAGGAAAGGCA′] |
| 3748 | NM_000489.4(ATRX): c.6488A > G | 546 | ATRX | [′GGACAAACTAAGCCTGTTTATGTATRTAGG |
| | (p.Tyr2163Cys) | | | TTCTTAGCTCAGGTAGGTTTA′] |
| 3749 | NM_000489.4(ATRX): c.6811A > G | 546 | ATRX | [′AGAAGAAGAGTTGACTGAAGAAGAARGA |
| | (p.Arg2271Gly) | | | AAAGCAGCTTGGGCTGAGTATGA′] |
| 3750 | NM_000052.6(ATP7A): c.3911A > G | 538 | ATP7A | [′GTAGCAATGGTGGGAGATGGAATCARTGA |
| | (p.Asn1304Ser) | | | CTCCCCAGCTCTGGCAATGGCT′] |
| 3751 | NM_004992.3(MECP2): c.410A > G | 4204 | MECP2 | [′GGAAAAGCCTTTCGCTCTAAAGTGGRGTT |
| | (p.Glu137Gly) | | | GATTGCGTACTTCGAAAAGGTA′] |
| 3752 | NM_000137.2(FAH): c.1141A > G | 2184 | FAH | [′CATAGACCTGGGGAATGGTCAGACCRGGA |
| | (p.Arg381Gly) | | | AGTTTCTGCTGGACGGGGATGA′] |
| 3753 | NM_000137.2(FAH): c.836A > G | 2184 | FAH | [′CCCTTTGCTGTGCCCAACCCGAAGCRGGTA |
| | (p.Gln279Arg) | | | AGCACATTCTCTGCAGGAAGC′] |
| 3754 | NM_002769.4(PRSS1): c.68A > G | −1 | — | [′GCTGCCCCCTTTGATGATGATGACARGATC |
| | (p.Lys23Arg) | | | GTTGGGGGCTACAACTGTGAG′] |
| 3755 | NM_002769.4(PRSS1): c.161A > G | −1 | — | [′CACTTCTGTGGTGGCTCCCTCATCARCGAA |
| | (p.Asn54Ser) | | | CAGTGGGTGGTATCAGCAGGC′] |
| 3756 | NM_000373.3(UMPS): c.286A > G | 7372 | UMPS | [′AACCAATCAAATTCCAATGCTTATTRGAAG |
| | (p.Arg96Gly) | | | GAAAGAAACAAAGGATTATGG′] |
| 3757 | NM_001918.3(DBT): c.1355A > G | 1629 | DBT | [′ATGAATGTGAGCTGGTCAGCTGATCRCAG |
| | (p.His452Arg) | | | AGTTATTGATGGTGCTACAATG′] |
| 3758 | NM_000108.4(DLD): c.214A > G | 1738 | DLD | [′TTGGTTGTAGACAGTCTGCATTGAGRAAA |
| | (p.Lys72Glu) | | | ATGAAACACTTGGTGGAACATG′] |
| 3759 | NM_000108.4(DLD): c.1483A > G | 1738 | DLD | [′CTTGCAGACCTTATCAGAAGCTTTTRGAGA |
| | (p.Arg495Gly) | | | AGCAAATCTTGCTGCGTCATT′] |
| 3760 | NM_000108.4(DLD): c.1081A > G | 1738 | DLD | [′CATTGGTGATGTAGTTGCTGGTCCARTGCT |
| | (p.Met361 Val) | | | GGCTCACAAAGCAGAGGATGA′] |
| 3761 | NM_000481.3(AMT): c.125A > G | 275 | AMT | [′CGCAGGACACCGCTCTATGACTTCCRCCTG |
| | (p.His42Arg) | | | GCCCACGGCGGGAAAATGGTG′] |
| 3762 | NM_000151.3(G6PC): | 2538 | G6PC | [′GGCTCAACCTCGTCTTTAAGTGGTARGAAC |
| | c.230 + 4A > G | | | CATATAGAGAGGAGATCAGCA′] |
| 3763 | NM_000532.4(PCCB): c.1304A > G | 5096 | PCCB | [′CAGCATTTGGATCTGTTTTAGGCCTRTGGA |
| | (p.Tyr435Cys) | | | GGTGCCTATGATGTCATGAGC′] |
| 3764 | NM_000387.5(SLC25A20): | 788 | SLC25A20 | [′CCAGATGTGCTCAAGTCTCGATTCCRGACT |
| | c.713A > G (p.Gln238Arg) | | | GGTGAGTGGAAGGTAGTGGGG′] |
| 3765 | NM_004360.3(CDH1): c.2512A > G | 999 | CDH1 | [′TCTGCTCGTGTTTGACTATGAAGGARGCGG |
| | (p.Ser838Gly) | | | TTCCGAAGCTGCTAGTCTGAG′] |
| 3766 | NM_004360.3(CDH1): c.1018A > G | 999 | CDH1 | [′GTCGATCTCTCTGCAGAGTTTCCCTDCGTA |
| | (p.Thr340Ala) | | | TACCCTGGTGGTTCAAGCTGC′] |
| 3767 | NM_003361.3(UMOD): c.383A > G | 7369 | UMOD | [′TGCCACGCCCTGGCCACATGTGTCARTGTG |
| | (p.Asn128Ser) | | | GTGGGCAGCTACTTGTGCGTA′] |
| 3768 | NM_000463.2(UGT1A1): | −1 | — | [′GCTGATGCTTTGGGCAAAATCCCTCRGACA |
| | c.992A > G (p.Gln331Arg) | | | GTAAGAAGATTCTATACCATG′] |
| 3769 | NM_000463.2(UGT1A1): | −1 | — | [′TGACATCCTCCCTATTTTGCATCTCRGGTC |
| | c.1085 − 2A > G | | | ACCCGATGACCCGTGCCTTTA′] |
| 3770 | NM_000463.2(UGT1A1): c.1070A > | −1 | — | [′ACGATACTTGTTAAGTGGCTACCCCRAAAC |
| | G (p.Gln357Arg) | | | GATCTGCTTGGTATGTTGGGC′] |
| 3771 | NM_000463.2(UGT1A1): c.1198A > | −1 | — | [′GCCCTTGTTTGGTGATCAGATGGACVATGC |
| | G (p.Asn400Asp) | | | AAAGCGCATGGAGACTAAGGG′] |
| 3772 | NM_001382.3(DPAGT1): | 1798 | DPAGT1 | [′TCTCTCCCCGCAGGAATCCTGTACTRTGTC |
| | c.509A > G (p.Tyr170Cys) | | | TACATGGGGCTGCTGGCAGTG′] |
| 3773 | NM_001007792.1(NTRK1): | 4914 | NTRK1 | [′CCCACCCACGTCAACAACGGCAACTRCAC |
| | c.986A > G (p.Tyr329Cys) | | | GCTGCTGGCTGCCAACCCCTTC′] |
| 3774 | NM_001007792.1(NTRK1): | 4914 | NTRK1 | [′CTGCACCGAGGGCCGCCCCCTGCTCRTGGT |
| | c.1651A > G (p.Met551 Val) | | | CTTTGAGTATATGCGGCACGG′] |
| 3775 | NM_000363.4(TNNI3): c.569A > G | 7137 | TNNI3 | [′CTCCAGGAAAACCGGGAGGTGGGAGRCTG |
| | (p.Asp190Gly) | | | GCGCAAGAACATCGATGCACTG′] |
| 3776 | NM_000363.4(TNNI3): c.532A > G | 7137 | TNNI3 | [′GCGGGCCCACCTCAAGCAGGTGAAGRAGG |
| | (p.Lys178Glu) | | | AGGACACCGAGAAGGTGAGTGT′] |
| 3777 | NM_001018005.1(TPM1): | 7168 | TPM1 | [′ATTGAGAGCGACCTGGAACGTGCAGDGGA |
| | c.539A > G (p.Glu180Gly) | | | GCGGGCTGAGCTCTCAGAAGGG′] |
| 3778 | NM_001159287.1(TPI1): | 7167 | TPI1 | [′CCTGGCCTATGAGCCTGTGTGGGCCRTTGG |
| | c.622A > G (p.Ile208Val) | | | TACTGGCAAGACTGCAACACC′] |
| 3779 | NM_000359.2(TGM1): c.1469A > G | 7051 | TGM1 | [′AATGGCCTGGTCTACATGAAGTACGRCAC |
| | (p.Asp490Gly) | | | GCCTTTCATTTTTGCTGAGGTG′] |
| 3780 | NM_001024847.2(TGFBR2): | 7048 | TGFBR2 | [′CCCTGTGTTTGCTGGCTTTCTTCACRGAAG |
| | c.1472 − 2A > G | | | TAAAAGATTATGAGCCTCCAT′] |
| 3781 | NM_003242.5(TGFBR2): | 7048 | TGFBR2 | [′GCTATAGGTGGGAACTGCAAGATACRTGG |
| | c.1273A > G (p.Met425Val) | | | CTCCAGAAGTCCTAGAATCCAG′] |
| 3782 | NM_004612.3(TGFBR1): | 7046 | TGFBR1 | [′CATTTTGAATCCTTCAAACGTGCTGRCATC |
| | c.1199A > G (p.Asp400Gly) | | | TATGCAATGGGCTTAGTATTC′] |
| 3783 | NM_001128177.1(THRB): | 7068 | THRB | [′CTGCCATGCCAGCCGCTTCCTGCACRTGAA |
| | c.1324A > G (p.Met442Val) | | | GGTGGAATGCCCCACAGAACT′] |
| 3784 | NM_001128177.1(THRB): | 7068 | THRB | [′CCATGCCAGCCGCTTCCTGCACATGRAGGT |
| | c.1327A > G (p.Lys443Glu) | | | GGAATGCCCCACAGAACTCTT′] |
| 3785 | NM_001128177.1(THRB): | 7068 | THRB | [′AACCTTGAATGGGGAAATGGCAGTGRCAC |
| | c.1009A > G (p.Thr337Ala) | | | GGGGCCAGCTGAAAAATGGGGG′] |
| 3786 | NM_033360.3(KRAS): c.13A > G | 3845 | KRAS | [′AGGCCTGCTGAAAATGACTGAATATRAAC |
| | (p.Lys5Glu) | | | TTGTGGTAGTTGGAGCTGGTGG′] |
| 3787 | NM_005343.2(HRAS): c.350A > G | −1 | — | [′GTGCCCATGGTGCTGGTGGGGAACARGTG |
| | (p.Lys117Arg) | | | TGACCTGGCTGCACGCACTGTG′] |
| 3788 | NM_001063.3(TF): c.956A > G | 7018 | TF | [′GACCTGCTGTTTAAGGACTCTGCCCRCGGG |
| | (p.His319Arg) | | | TTTTTAAAAGTCCCCCCCAGG′] |
| 3789 | NM_001063.3(TF): c.1936A > G | 7018 | TF | [′CTTTTGTTTGTTCCGGTCGGAAACCRAGGA |
| | (p.Lys646Glu) | | | CCTTCTGTTCAGAGATGACAC′] |
| 3790 | NM_212472.2(PRKAR1A): | 5573 | PRKAR1A | [′ATGAGTTCTTCATTATTTTAGAGGTRAAGA |
| | c.891+ 3A > G | | | ACTCAGAATTTAATACTTGAA′] |
| 3791 | NM_212472.2(PRKAR1A): c.1A > G | 5573 | PRKAR1A | [′GTGTGTTTTTTTCTCGCAGAGAACCRTGGA |
| | (p.Met1Val) | | | GTCTGGCAGTACCGCCGCCAG′] |
| 3792 | NM_000362.4(TIMP3): c.572A > G | −1 | — | [′GCCTGCATCCGGCAGAAGGGCGGCTRCTG |
| | (p.Tyr191Cys) | | | CAGCTGGTACCGAGGATGGGCC′] |
| 3793 | NM_000367.3(TPMT): c.719A > G | 7172 | TPMT | [′GATTACAGGTGTGAGCCACCGCACCNAGC |
| - | (p.Tyr240Cys) | | | CAATTTTGAGTATTTTTAAAAG′, |
| 3795 | | | | ′TAACATGTTACTCTTTCTTGTTTCARGTAAA |
| | | | | ATATGCAATATACRTYGTCT′, |
| | | | | ′AGGTTGATGCTTTTGAAGAACGACAKAAAA |
| | | | | GTTGGGGAATTGACTGTCTTT′] |
| 3796 | NM_198253.2(TERT): c.2315A > G | 7015 | TERT | [′TCTACCTTGACAGACCTCCAGCCGTRCATG |
| | (p.Tyr772Cys) | | | CGACAGTTCGTGGCTCACCTG′] |
| 3797 | NM_000073.2(CD3G): c.1A > G | 917 | CD3G | [′CTTTTGCCGGAGGACAGAGACTGACRTGG |
| | (p.Met1Val) | | | AACAGGGGAAGGGCCTGGCTGT′] |
| 3798 | NM_000899.4(KITLG): c.107A > G | 4254 | KITLG | [′ATCTGCAGGAATCGTGTGACTAATARTGTA |
| | (p.Asn36Ser) | | | AAAGACGTCACTAAATTGGTA′] |
| 3799 | NM_001024858.2(SPTB): c.1A > G | 6710 | SPTB | [′GCGGAGCTGCTAAGAGCCTGCTGACRTGA |
| | (p.Met1Val) | | | CATCGGCCACAGAGTTTGAAAA′] |
| 3800 | NM_003126.2(SPTA1): c.143A > G | 6708 | SPTA1 | [′GAGCGGGTCGCTGAGAGGGGTCAGARGCT |
| | (p.Lys48Arg) | | | TGAGGATTCCTATCACTTACAA′] |
| 3801 | NM_005633.3(SOS1): c.1654A > G | 6654 | SOS1 | [′TTTACAGTACCGGAGTACACTGGAARGGA |
| | (p.Arg552Gly) | | | TGCTTGATGTAACAATGCTACA′] |
| 3802 | NM_003041.3(SLC5A2): | −1 | — | [′GACCCGAGCTGGGCCCGTGTGGTCARCCT |
| | c.1961A > G (p.Asn654Ser) | | | CAATGCCCTGCTCATGATGGCA′] |
| 3803 | NM_000343.3(SLC5A1): c.83A > G | 6523 | SLC5A1 | [′CACGAGCTCATTCGCAATGCAGCCGRTATC |
| | (p.Asp28Gly) | | | TCCATCATCGTTATCTACTTC′] |
| 3804 | NM_000702.3(ATP1A2): | 477 | ATP1A2 | [′TCTCTACCAGGTGTGCCTGACCCTGRCAGC |
| | c.1033A > G (p.Thr345Ala) | | | CAAGCGCATGGCACGGAAGAA′] |
| 3805 | NM_003124.4(SPR): c.448A > G | 6697 | SPR | [′CTTCCCGGACAGTCCTGGCCTCAACRGAAC |
| | (p.Arg150Gly) | | | CGTGGTTAACATCTCGTCCCT′] |
| 3806 | NM_001161766.1(AHCY): | 191 | AHCY | [′CTCACCAACCTCATCCACACCAAGTRCCCG |
| | c.344A > G (p.Tyr115Cys) | | | CAGCTTCTGCCAGGTGAGCAG′] |
| 3807 | NM_001035.2(RYR2): | 6262 | RYR2 | [′TGCGAGGACACCATCTTTGAAATGCRGCT |
| | c.12602A > G (p.Gln4201Arg) | | | GGCGGCTCAGATCTCGGAGTCG′] |
| 3808 | NM_000540.2(RYR1): | 6261 | RYR1 | [′CAGTCCTTCCTGTACCTGGGCTGGTRTATG |
| | c.14387A > G (p.Tyr4796Cys) | | | GTGATGTCCCTCTTGGGACAC′] |
| 3809 | NM_000540.2(RYR1): | 6261 | RYR1 | [′CTCTGTCTCAAAAAAAAAAAAAAACRTAT |
| | c.14647 − 1449A > G | | | GTAAAGTTGTTCCCAAATGCCA′] |
| 3810 | NM_000540.2(RYR1): | 6261 | RYR1 | [′GGTGTACTACTTCCTGGAGGAAAGCRCAG |
| | c.13909A > G (p.Thr4637Ala) | | | GCTACATGGAACCCGCCCTGCG′] |
| 3811 | NM_000539.3(RHO): c.533A > G | 6010 | RHO | [′TCTCCCTACCTGCCTGTCCTCAGGTRCATC |
| | (p.Tyr178Cys) | | | CCCGAGGGCCTGCAGTGCTCG′] |
| 3812 | NM_000539.3(RHO): c.569A > G | 6010 | RHO | [′GGCCTGCAGTGCTCGTGTGGAATCGRCTAC |
| | (p.Asp190Gly) | | | TACACGCTCAAGCCGGAGGTC′] |
| 3813 | NM_000539.3(RHO): c.886A > G | 6010 | RHO | [′CATGACCATCCCAGCGTTCTTTGCCRAGAG |
| | (p.Lys296Glu) | | | CGCCGCCATCTACAACCCTGT′] |
| 3814 | NM_000539.3(RHO): c.44A > G | 6010 | RHO | [′CCTAACTTCTACGTGCCCTTCTCCARTGCG |
| | (p.Asn15Ser) | | | ACGGGTGTGGTACGCAGCCCC′] |
| 3815 | NM_000321.2(RB1): | 5925 | RB1 | [′AAGGGTGCTGTGGATCAGGGAAATGRTGA |
| | c.2490 − 1398A > G | | | GTATGAAGCTGTTTTAAATTCT′] |
| 3816 | NM_000536.3(RAG2): c.115A > G | 5897 | RAG2 | [′CTTTGGACAAAAAGGCTGGCCCAAARGAT |
| | (p.Arg39Gly) | | | CCTGCCCCACTGGAGTTTTCCA′] |
| 3817 | NM_000448.2(RAG1): c.2735A > G | 5896 | RAG1 | [′GAGTGCCCAGAATCCCTCTGCCAGTRCAGT |
| | (p.Tyr912Cys) | | | TTCAATTCACAGCGTTTTGCT′] |
| 3818 | NM_000448.2(RAG1): c.1286A > G | 5896 | RAG1 | [′TTTGCTGACAAAGAAGAAGGTGGAGRTGT |
| | (p.Asp429Gly) | | | GAAGTCCGTGTGCATGACCTTG′] |
| 3819 | NM_000925.3(PDHB): c.395A > G | 5162 | PDHB | [′ATAAACTCAGCTGCCAAGACCTACTRCAT |
| | (p.Tyr132Cys) | | | GTCTGGTGGCCTTCAGCCTGTG′] |
| 3820 | NM_000055.2(BCHE): c.293A > G | 590 | BCHE | [′GCAAATTCTTGCTGTCAGAACATAGRTCAA |
| | (p.Asp98Gly) | | | AGTTTTCCAGGCTTCCATGGA′] |
| 3821 | NM_000055.2(BCHE): c.467A > G | 590 | BCHE | [′ACTGGAACATCATCTTTACATGTTTDTGAT |
| | (p.Tyr156Cys) | | | GGCAAGTTTCTGGCTCGGGTT′] |
| 3822 | NM_005360.4(MAF): c.890A > G | 4094 | MAF | [′CTGAAGCAGAAGAGGCGGACCCTGARAAA |
| | (p.Lys297Arg) | | | CCGCGGCTATGCCCAGTCCTGC′] |
| 3823 | NM_002739.3(PRKCG): c.380A > G | 5582 | PRKCG | [′TCCCTCCTCTACGGGCTTGTGCACCRGGGC |
| | (p.Gln127Arg) | | | ATGAAATGCTCCTGTGAGTGA′] |
| 3824 | NM_002739.3(PRKCG): | 5582 | PRKCG | [′CTTCCTCATGGTTCTAGGAAAAGGCRGTTT |
| | c.1081A > G (p.Ser361Gly) | | | TGGGAAGGTTGGATTCCTGGG′] |
| 3825 | NM_000141.4(FGFR2): c.983A > G | 2263 | FGFR2 | [′ACGGACAAAGAGATTGAGGTTCTCTRTATT |
| | (p.Tyr328Cys) | | | CGGAATGTAACTTTTGAGGAC′] |
| 3826 | NM_000141.4(FGFR2): | 2263 | FGFR2 | [′AAGGAGATTACAGCTTCCCCAGACTRCCT |
| | c.1124A > G (p.Tyr375Cys) | | | GGAGATAGCCATTTACTGCATA′] |
| 3827 | NM_000141.4(FGFR2): c.874A > G | 2263 | FGFR2 | [′TGCCCAGCCCCACATCCAGTGGATCRAGC |
| | (p.Lys292Glu) | | | ACGTGGAAAAGAACGGCAGTAA′] |
| 3828 | NM_000141.4(FGFR2): | 2263 | FGFR2 | [′ACTGTTCATAGATGATGCCACAGAGRAAG |
| | c.1576A > G (p.Lys526Glu) | | | ACCTTTCTGATCTGGTGTCAGA′] |
| 3829 | NM_000313.3(PROS1): c.773A > G | 5627 | PROS1 | [′AACATGTGTGCTCAGCTTTGTGTCARTTAC |
| | (p.Asn258Ser) | | | CCTGGAGGTTACACTTGCTAT′] |
| 3830 | NM_000313.3(PROS1): c.586A > G | 5627 | PROS1 | [′AAATGGTTTTGTTATGCTTTCAAATRAGAA |
| | (p.Lys196Glu) | | | AGATTGTAAAGGTAAGAGCAG′] |
| 3831 | NM_002834.3(PTPN11): | 5781 | PTPN11 | [′GCCTGTTTCAGATTACATCAATGCARATAT |
| | c.922A > G (p.Asn308Asp) | | | CATCATGGTAAGCTTTGCTTT′] |
| 3832 | NM_002834.3(PTPN11): | 5781 | PTPN11 | [′CCTGTTTCAGATTACATCAATGCAAVTATC |
| | c.923A > G (p.Asn308Ser) | | | ATCATGGTAAGCTTTGCTTTT′] |
| 3833 | NM_002834.3(PTPN11): | 5781 | PTPN11 | [′CAAGAAAACAAAAACAAAAATAGATVTA |
| | c.836A > G (p.Tyr279Cys) | | | AAAACATCCTGCCCTGTAAGTAT′] |
| 3834 | NM_002834.3(PTPN11): | 5781 | PTPN11 | [′CACATCAAGATTCAGAACACTGGTGNTTA |
| | c.182A > G (p.Asp61Gly) | | | CTATGACCTGTATGGAGGGGAG′] |
| 3835 | NM_002834.3(PTPN11): | 5781 | PTPN11 | [′AAGATTCAGAACACTGGTGATTACTRTGA |
| | c.188A > G (p.Tyr63Cys) | | | CCTGTATGGAGGGGAGAAATTT′] |
| 3836 | NM_002834.3(PTPN11): | 5781 | PTPN11 | [′GGGGAGAAATTTGCCACTTTGGCTGNGTT |
| | c.227A > G (p.Glu76Gly) | | | GGTCCAGTATTACATGGAACAT′] |
| 3837 | NM_002834.3(PTPN11): | 5781 | PTPN11 | [′TTTGCCACTTTGGCTGAGTTGGTCCRGTAT |
| | c.236A > G (p.Gln79Arg) | | | TACATGGAACATCACGGGCAA′] |
| 3838 | NM_002834.3(PTPN11): | 5781 | PTPN11 | [′TCAGGGATGGTCCAGACAGAAGCACVGTA |
| | c.1529A > G (p.Gln510Arg) | | | CCGATTTATCTATATGGCGGTC′] |
| 3839 | NM_002755.3(MAP2K1): | 5604 | MAP2K1 | [′AACTCTCCGTACATCGTGGGCTTCTRTGGT |
| | c.389A > G (p.Tyr130Cys) | | | GCGTTCTACAGCGATGGCGAG′] |
| 3840 | NM_006006.4(ZBTB16): | 7704 | ZBTB16 | [′CCAGCGCTCCCGGGACTACTCGGCCRTGAT |
| | c.1849A > G (p.Met617Val) | | | CAAGCACCTGAGAACGCACAA′] |
| 3841 | NM_000311.3(PRNP): c.385A > G | 5621 | PRNP | [′AGTGGTGGGGGGCCTTGGCGGCTACRTGC |
| | (p.Met129Val) | | | TGGGAAGTGCCATGAGCAGGCC′] |
| 3842 | NM_000311.3(PRNP): c.650A > G | 5621 | PRNP | [′GTGGTTGAGCAGATGTGTATCACCCRGTAC |
| | (p.Gln217Arg) | | | GAGAGGGAATCTCAGGCCTAT′] |
| 3843 | NM_000311.3(PRNP): c.547A > G | 5621 | PRNP | [′CTTTGTGCACGACTGCGTCAATATCRCAAT |
| | (p.Thr183Ala) | | | CAAGCAGCACACGGTCACCAC′] |
| 3844 | NM_000311.3(PRNP): c.560A > G | 5621 | PRNP | [′TGCGTCAATATCACAATCAAGCAGCRCAC |
| | (p.His187Arg) | | | GGTCACCACAACCACCAAGGGG′] |
| 3845 | NM_000371.3(TTR): c.401A > G | 7276 | TTR | [′ACCATTGCCGCCCTGCTGAGCCCCTRCTCC |
| | (p.Tyr134Cys) | | | TATTCCACCACGGCTGTCGTC′] |
| 3846 | NM_000371.3(TTR): c.238A > G | 7276 | TTR | [′GTCTGGAGAGCTGCATGGGCTCACARCTG |
| | (p.Thr80Ala) | | | AGGAGGAATTTGTAGAAGGGAT′] |
| 3847 | NM_000371.3(TTR): c.185A > G | 7276 | TTR | [′AGAAAGGCTGCTGATGACACCTGGGRGCC |
| | (p.Glu62Gly) | | | ATTTGCCTCTGGGTAAGTTGCC′] |
| 3848 | NM_000371.3(TTR): c.205A > G | 7276 | TTR | [′CCAGACTTTCACACCTTATAGGAAARCCA |
| | (p.Thr69Ala) | | | GTGAGTCTGGAGAGCTGCATGG′] |
| 3849 | NM_000371.3(TTR): c.379A > G | 7276 | TTR | [′CGACTCCGGCCCCCGCCGCTACACCRTTGC |
| | (p.Ile127Val) | | | CGCCCTGCTGAGCCCCTACTC′] |
| 3850 | NM_000371.3(TTR): c.113A > G | 7276 | TTR | [′TGTCCTCTGATGGTCAAAGTTCTAGRTGCT |
| | (p.Asp38Gly) | | | GTCCGAGGCAGTCCTGCCATC′] |
| 3851 | NM_000217.2(KCNA1): c.676A > G | 3736 | KCNA1 | [′CACAGACCCCTTCTTCATCGTGGAARCGCT |
| | (p.Thr226Ala) | | | GTGTATCATCTGGTTCTCCTT′] |
| 3852 | NM_000217.2(KCNA1): c.763A > G | 3736 | KCNA1 | [′GACGGACTTCTTCAAAAACATCATGRACTT |
| | (p.Asn255Asp) | | | CATAGACATTGTGGCCATCAT′] |
| 3853 | NM_002693.2(POLG): c.2864A > G | 5428 | POLG | [′AAAATCTTCAACTACGGCCGCATCTRTGGT |
| | (p.Tyr955Cys) | | | GCTGGGCAGCCCTTTGCTGAG′] |
| 3854 | NM_002693.2(POLG): c.2591A > G | 5428 | POLG | [′GAGCCCACATGGCTCACCGCCAGCARTGC |
| | (p.Asn864Ser) | | | CCGGGTATGTGACCTCTGTACC′] |
| 3855 | NM_000174.4(GP9): c.182A > G | 2815 | GP9 | [′ACCCGCCACCTTCTGCTGGCCAACARCAGC |
| | (p.Asn61Ser) | | | CTTCAGTCCGTGCCCCCGGGA′] |
| 3856 | NM_000174.4(GP9): c.110A > G | 2815 | GP9 | [′CTGGAAACCATGGGGCTGTGGGTGGRCTG |
| | (p.Asp37Gly) | | | CAGGGGCCACGGACTCACGGCC′] |
| 3857 | NM_006206.4(PDGFRA): | 5156 | PDGFRA | [′CCTGGTCATTTATAGAAACCGAGGTRTGA |
| | c.1664A > G (p.Tyr555Cys) | | | AATTCGCTGGAGGGTCATTGAA′] |
| 3858 | NM_000301.3(PLG): c.112A > G | 5340 | PLG | [′GGGGGCTTCACTGTTCAGTGTCACTRAGAA |
| | (p.Lys38Glu) | | | GCAGCTGGGAGCAGGAAGTAT′] |
| 3859 | NM_000293.2(PHKB): | 5257 | PHKB | [′GTTTCATGAGTTATCTCTCTCACCCRGGCG |
| | c.306 − 2A > G | | | AATTGATGATGACAAGGGAAG′] |
| 3860 | NM_000175.3(GPI): c.1028A > G | 2821 | GPI | [′ACACACGCCATGCTGCCCTATGACCRGTAC |
| | (p.Gln343Arg) | | | CTGCACCGCTTTGCTGCGTAC′] |
| 3861 | NM_002633.2(PGM1): c.343A > G | 5236 | PGM1 | [′CAAAGCCATTGGTGGGATCATTCTGRCAG |
| | (p.Thr115Ala) | | | CCAGTCACAACCCAGGGGGCCC′] |
| 3862 | NM_006218.2(PIK3CA): | 5290 | PIK3CA | [′TTCATGAAACAAATGAATGATGCACDTCA |
| | c.3140A > G (p.His1047Arg) | | | TGGTGGCTGGACAACAAAAATG′] |
| 3863 | NM_006218.2(PIK3CA): | 5290 | PIK3CA | [′CGAGATCCTCTCTCTGAAATCACTGVGCAG |
| | c.1634A > G (p.Glu545Gly) | | | GAGAAAGATTTTCTATGGAGT′] |
| 3864 | NM_000478.4(ALPL): c.1250A > G | 249 | ALPL | [′CCCTTCACTGCCATCCTGTATGGCARTGGG |
| | (p.Asn417Ser) | | | CCTGGCTACAAGGTGGTGGGC′] |
| 3865 | NM_018849.2(ABCB4): c.523A > G | 5244 | ABCB4 | [′AGAAATAAACAGGTATAAGATGTGARTTC |
| - | (p.Thr175Ala) | | | AGTCCTCAAATAAACCTACTAT′, |
| 3867 | | | | TTCTATATGAAAGTGTGACATTAACRATGT |
| | | | | ACCTACTCTGTTAGCCGCGYA′, |
| | | | | ′TTTCCTGTCGTAGAATAGCATGAAARAACT |
| | | | | TCTGCCTAATTTTCCTGATCT′] |
| 3868 | NM_001083116.1(PRF1): | 5551 | PRF1 | [′CTGGCCCTGGAAGGGCTCACGGACARCGA |
| | c.755A > G (p.Asn252Ser) | | | GGTGGAGGACTGCCTGACTGTC′] |
| 3869 | NM_198965.1(PTHLH): c.534A > G | 5744 | PTHLH | [′TTCCTTCTTTTTGCAGGAGGCATTGRAATT |
| | (p.Ter178Trp) | | | TTCAGCAGAGACCTTCCAAGG′] |
| 3870 | NM_000316.2(PTH1R): c.668A > G | 5745 | PTH1R | [′CTGCACTGCACGCGCAACTACATCCRCATG |
| | (p.His223Arg) | | | CACCTGTTCCTGTCCTTCATG′] |
| 3871 | NM_003122.4(SPINK1): | 6690 | SPINK1 | [′TTCCATTTTTAGGCCAAATGTTACARTGAA |
| | c.101A > G (p.Asn34Ser) | | | CTTAATGGATGCACCAAGATA′] |
| 3872 | NM_006194.3(PAX9): c.271A > G | 5083 | PAX9 | [′CGTGGTGAAACACATCCGGACCTACRAGC |
| | (p.Lys91Glu) | | | AGAGAGACCCCGGCATCTTCGC′] |
| 3873 | NM_013953.3(PAX8): c.160A > G | −1 | — | [′CGACATCTCTCGCCAGCTCCGCGTCRGCCA |
| | (p.Ser54Gly) | | | TGGCTGCGTCAGCAAGATCCT′] |
| 3874 | NM_005188.3(CBL): c.1144A > G | 867 | CBL | [′GATGGGCTCCACATTCCAACTATGTRAAAT |
| | (p.Lys382Glu) | | | ATGTGCTGAAAATGATAAGGA′] |
| 3875 | NM_000222.2(KIT): c.2459A > G | 3815 | KIT | [′GGTCTAGCCAGAGACATCAAGAATGRTTC |
| | (p.Asp820Gly) | | | TAATTATGTGGTTAAAGGAAAC′] |
| 3876 | NM_000222.2(KIT): c.2386A > G | 3815 | KIT | [′GTGTATTCACAGAGACTTGGCAGCCRGAA |
| | (p.Arg796Gly) | | | ATATCCTCCTTACTCATGGTCG′] |
| 3877 | NM_000222.2(KIT): c.1924A > G | 3815 | KIT | [′ACGGGAAGCCCTCATGTCTGAACTCRAAG |
| | (p.Lys642Glu) | | | TCCTGAGTTACCTTGGTAATCA′] |
| 3878 | NM_001005862.2(ERBB2): | 2064 | ERBB2 | [′CGGAACGTGCTGGTCAAGAGTCCCARCCA |
| | c.2480A > G (p.Asn827Ser) | | | TGTCAAAATTACAGACTTCGGG′] |
| 3879 | NM_001127500.1(MET): | 4233 | MET | [′GATTTTGGTCTTGCCAGAGACATGTRTGAT |
| | c.3743A > G (p.Tyr1248Cys) | | | AAAGAATACTATAGTGTACAC′] |
| 3880 | NM_001127500.1(MET): | 4233 | MET | [′ACAGGGCATTTTGGTTGTGTATATCVTGGG |
| | c.3335A > G (p.His1112Arg) | | | ACTTTGTTGGACAATGATGGC′] |
| 3881 | NM_001127500.1(MET): | 4233 | MET | [′AGTGTACACAACAAAACAGGTGCAARGCT |
| | c.3785A > G (p.Lys1262Arg) | | | GCCAGTGAAGTGGATGGCTTTG′] |
| 3882 | NM_002524.4(NRAS): c.182A > G | 4893 | NRAS | [′TTGGACATACTGGATACAGCTGGACNAGA |
| | (p.Gln61Arg) | | | AGAGTACAGTGCCATGAGAGAC′] |
| 3883 | NM_004333.4(BRAF): c.1801A > G | 673 | BRAF | [′AGGTGATTTTGGTCTAGCTACAGTGVAATC |
| | (p.Lys601Glu) | | | TCGATGGAGTGGGTCCCATCA′] |
| 3884 | NM_004333.4(BRAF): c.1781A > G | 673 | BRAF | [′GAAGACCTCACAGTAAAAATAGGTGDTTT |
| | (p.Asp594Gly) | | | TGGTCTAGCTACAGTGAAATCT′] |
| 3885 | NM_004333.4(BRAF): c.770A > G | 673 | BRAF | [′GACTTTTGTCGAAAGCTGCTTTTCCRGGGT |
| | (p.Gln257Arg) | | | TTCCGCTGTCAAACATGTGGT′] |
| 3886 | NM_004333.4(BRAF): c.1495A > G | 673 | BRAF | [′TACACCTCAGCAGTTACAAGCCTTCRAAA |
| | (p.Lys499Glu) | | | ATGAAGTAGGAGTACTCAGGTG′] |
| 3887 | NM_004333.4(BRAF): c.1502A > G | 673 | BRAF | [′CAGCAGTTACAAGCCTTCAAAAATGNAGT |
| | (p.Glu501Gly) | | | AGGAGTACTCAGGTGAGCTTGT′] |
| 3888 | NM_004333.4(BRAF): c.1741A > G | 673 | BRAF | [′CATCCACAGAGACCTCAAGAGTAATVGTA |
| | (p.Asn581Asp) | | | TCCTTCCTGAAATTTGTCTGCG′] |
| 3889 | NM_000270.3(PNP): c.383A > G | 4860 | PNP | [′CTGAACCCCAAGTTTGAGGTTGGAGRTATC |
| | (p.Asp128Gly) | | | ATGCTGATCCGTGACCATATC′] |
| 3890 | NM_000270.3(PNP): c.575A > G | 4860 | PNP | [′CAACGTGAGCTACAGGAAGGCACCTRTGT |
| | (p.Tyr192Cys) | | | GATGGTGGCAGGCCCCAGCTTT′] |
| 3891 | NM_000258.2(MYL3): c.445A > G | 4634 | MYL3 | [′CGACAAGGAGGGCAATGGCACTGTCRTGG |
| | (p.Met149Val) | | | GTGCTGAGCTTCGCCACGTGCT′] |
| 3892 | NM_000257.3(MYH7): c.2333A > G | 4625 | MYH7 | [′CTGGGGCTGCTGGAGGAAATGAGGGRCGA |
| | (p.Asp778Gly) | | | GAGGCTGAGCCGCATCATCACG′] |
| 3893 | NM_000257.3(MYH7): c.2717A > G | 4625 | MYH7 | [′CTGGCAGATGCTGAGGAGCGCTGTGRTCA |
| | (p.Asp906Gly) | | | GCTGATCAAAAACAAGATTCAG′] |
| 3894 | NM_002470.3(MYH3): c.1385A > G | 4621 | MYH3 | [′AGACAACACTTCATTGGTGTTTTGGRCATT |
| | (p.Asp462Gly) | | | GCAGGCTTTGAAATCTTTGAG′] |
| 3895 | NM_000530.6(MPZ): c.286A > G | 4359 | MPZ | [′CTACATTGACGAGGTGGGGACCTTCRAAG |
| | (p.Lys96Glu) | | | AGCGCATCCAGTGGGTAGGGGA′] |
| 3896 | NM_000530.6(MPZ): c.242A > G | 4359 | MPZ | [′TCCCCTCATTCCTCATAGATCTTCCRCTAT |
| | (p.His81Arg) | | | GCCAAGGGACAACCCTACATT′] |
| 3897 | NG_012123.1: g.2493A > G | 6347 | CCL2 | [′GAAAAGAAAGTCTTCTGGAAAGTGAYAGC |
| | | | | TGTCTGCCTCCCACTTCTGCTC′] |
| 3898 | RMRP: n.71A > G | 6023 | RMRP | [′TGTTCCTCCCCTTTCCGCCTAGGGGRAAGT |
| | | | | CCCCGGACCTCGGGCAGAGAG′] |
| 3899 | NM_005006.6(NDUFS1): | 4719 | NDUFS1 | [′TTTCTCAGAAAGACAGAATCCATTGRTGTA |
| | c.755A > G (p.Asp252Gly) | | | ATGGATGCGGTTGGAAGTAAT′] |
| 3900 | NM_005912.2(MC4R): c.508A > G | 4160 | MC4R | [′GACAGTTAAGCGGGTTGGGATCATCRTAA |
| | (p.Ile170Val) | | | GTTGTATCTGGGCAGCTTGCAC′] |
| 3901 | NM_005912.2(MC4R): c.821A > G | 4160 | MC4R | [′ATATTCTACATCTCTTGTCCTCAGARTCCA |
| | (p.Asn274Ser) | | | TATTGTGTGTGCTTCATGTCT′] |
| 3902 | NM_005912.2(MC4R): c.289A > G | 4160 | MC4R | [′GGCTGATATGCTGGTGAGCGTTTCARATGG |
| | (p.Asn97Asp) | | | ATCAGAAACCATTGTCATCAC′] |
| 3903 | NM_005912.2(MC4R): c.185A > G | 4160 | MC4R | [′CTGGGTGTCATCAGCTTGTTGGAGARTATC |
| | (p.Asn62Ser) | | | TTAGTGATTGTGGCAATAGCC′] |
| 3904 | NM_000900.3(MGP): | 4256 | MGP | [′AAGATTCCATGCTTTCATGTGATTCHGAAA |
| | c.62 − 2A > G | | | TTAAAAAAAAAAGATTCATTA′] |
| 3905 | NM_012064.3(MIP): c.401A > G | 4284 | MIP | [′AGCGTGGGCCAGGCAACCACAGTGGRGAT |
| | (p.Glu134Gly) | | | CTTCCTGACGCTCCAGTTCGTG′] |
| 3906 | NM_000233.3(LHCGR): | −1 | — | [′AAAATGGCAATCCTCATCTTCACCGRTTTC |
| | c.1733A > G (p.Asp578Gly) | | | ACCTGCATGGCACCTATCTCT′] |
| 3907 | NM_000233.3(LHCGR) | −1 | — | [′CCAGAATTAATGGCTACCAATAAAGRTAC |
| | c.1691A > G (p.Asp564Gly) | | | AAAGATTGCTAAGAAAATGGCA′] |
| 3908 | NM_000894.2(LHB): c.221A > G | 3972 | LHB | [′CAGGCGGTCCTGCCGCCCCTGCCTCRGGTG |
| | (p.Gln74Arg) | | | GTGTGCACCTACCGTGATGTG′] |
| 3909 | NM_000238.3(KCNH2): | 3757 | KCNH2 | [′CATGTTCATTGTGGACATCCTCATCRACTT |
| | c.1408A > G (p.Asn470Asp) | | | CCGCACCACCTACGTCAATGC′] |
| 3910 | NM_001754.4(RUNX1): c.328A > G | 861 | RUNX1 | [′GCTGCCTACGCACTGGCGCTGCAACRAGA |
| | (p.Lys110Glu) | | | CCCTGCCCATCGCTTTCAAGGT′] |
| 3911 | NM_170707.3(LMNA): c.608A > G | 4000 | LMNA | [′AACAGGCTGCAGACCATGAAGGAGGDACT |
| | (p.Glu203Gly) | | | GGACTTCCAGAAGAACATCTAC′] |
| 3912 | NM_000421.3(KRT10): | −1 | — | [′TGAATACCAACAACTCCTGGATATTDAGA |
| | c.1315A > G (p.Lys439Glu) | | | TCCGACTGGAGAATGAAATTCA′] |
| 3913 | NM_000421.3(KRT10): | −1 | — | [′CCGCCGCGTCCGCCGCCTCCGGAACYAAA |
| | c. 1374 − 2A > G | | | CGGGGTGAGGTCACATTCGGTT′] |
| 3914 | NM_000422.2(KRT17): c.274A > G | 3872 | KRT17 | [′TGAGAAGGCCACCATGCAGAACCTCVATG |
| | (p.Asn92Asp) | | | ACCGCCTGGCCTCCTACCTGGA′] |
| 3915 | NM_000422.2(KRT17): c.275A > G | 3872 | KRT17 | [′GAGAAGGCCACCATGCAGAACCTCARTGA |
| | (p.Asn92Ser) | | | CCGCCTGGCCTCCTACCTGGAC′] |
| 3916 | NM_005557.3(KRT16): c.374A > G | 3868 | KRT16 | [′GAGAAGGTGACCATGCAGAACCTCARTGA |
| | (p.Asn125Ser) | | | CCGCCTGGCCTCCTACCTGGAC′] |
| 3917 | NM_000526.4(KRT14): c.368A > G | 3861 | KRT14 | [′GAGAAGGTGACCATGCAGAACCTCARTGA |
| | (p.Asn123Ser) | | | CCGCCTGGCCTCCTACCTGGAC′] |
| 3918 | NM_000424.3(KRT5): c.1424A > G | 3852 | KRT5 | [′ATCGCCACTTACCGCAAGCTGCTGGRGGG |
| | (p.Glu475Gly) | | | CGAGGAATGCAGGTGAGTAGAC′] |
| 3919 | NM_000418.3(IL4R): c.223A > G | 3566 | IL4R | [′CTGTGTCTGCAGAGCCCACACGTGTNTCCC |
| | (p.Ile75Val) | | | TGAGAACAACGGAGGCGCGGG′] |
| 3920 | NM_001079817.1(INSR): | 3643 | INSR | [′CCAGGAGAGAAACGACATTGCCCTGRAGA |
| | c.1459A > G (p.Lys487Glu) | | | CCAATGGGGACCAGGCATCCTG′] |
| 3921 | NM_000208.2(INSR): c.707A > G | 3643 | INSR | [′TGCACCGCCGAAGGCCTCTGTTGCCRCAGC |
| | (p.His236Arg) | | | GAGTGCCTGGGCAACTGTTCT′] |
| 3922 | NM_000208.2(INSR): c.1466A > G | 3643 | INSR | [′AGAAACGACATTGCCCTGAAGACCARTGG |
| | (p.Asn489Ser) | | | GGACCAGGCATCCTGTAAGTCA′] |
| 3923 | NM_000208.2(INSR): | 3643 | INSR | [′CTTCTAGCTCAGCTGCCAGATTGTCYAAGG |
| | c.1124 − 2A > G | | | AAAGGAGAGAATATCCAGTGG′] |
| 3924 | NM_000208.2(INSR): c.1372A > G | 3643 | INSR | [′TCAGGGGAAACTCTTCTTCCACTATRACCC |
| | (p.Asn458Asp) | | | CAAACTCTGCTTGTCAGAAAT′] |
| 3925 | NM_000454.4(SOD1): c.131A > G | 6647 | SOD1 | [′ATTAAAGGACTGACTGAAGGCCTGCRTGG |
| | (p.His44Arg) | | | ATTCCATGTTCATGAGTTTGGA′] |
| 3926 | NM_000454.4(SOD1): c.302A > G | 6647 | SOD1 | [′GATGGTGTGGCCGATGTGTCTATTGRAGAT |
| | (p.Glu101Gly) | | | TCTGTGATCTCACTCTCAGGA′] |
| 3927 | NM_000454.4(SOD1): c.140A > G | 6647 | SOD1 | [′CTGACTGAAGGCCTGCATGGATTCCRTGTT |
| | (p.His47Arg) | | | CATGAGTTTGGAGATAATACA′] |
| 3928 | NM_000454.4(SOD1): c.242A > G | 6647 | SOD1 | [′ATCTGATGCTTTTTCATTATTAGGCRTGTT |
| | (p.His81Arg) | | | GGAGACTTGGGCAATGTGACT′] |
| 3929 | NM_000183.2(HADHB): c.788A > G | 3032 | HADHB | [′GCACAGGATGAAGGACTCCTTTCTGRTGTG |
| | (p.Asp263Gly) | | | GTACCCTTCAAAGTACCAGGT′] |
| 3930 | NM_000523.3(HOXD13): | 3239 | HOXD13 | [′GAGAGACAAGTGACCATTTGGTTTCRGAA |
| | c.974A > G (p.Gln325Arg) | | | CCGAAGAGTGAAGGACAAGAAA′] |
| 3931 | NM_000545.6(HNF1A): c.365A > G | 6927 | HNF1A | [′CGTGTGGCGAAGATGGTCAAGTCCTRCCT |
| | (p.Tyr122Cys) | | | GCAGCAGCACAACATCCCACAG′] |
| 3932 | NM_000519.3(HBD): c.−81A > G | 3045 | HBD | [′CTGGAGCAGGGAGGACAGGACCAGCRTAA |
| | | | | AAGGCAGGGCAGAGTCGACTGT′] |
| 3933 | NM_000518.4(HBB): c.199A > G | 3043 | HBB | [′CCCTAAGGTGAAGGCTCATGGCAAGRAAG |
| | (p.Lys67Glu) | | | TGCTCGGTGCCTTTAGTGATGG′] |
| 3934 | NM_000518.4(HBB): c.59A > G | 3043 | HBB | [′GTTACTGCCCTGTGGGGCAAGGTGARCGT |
| | (p.Asn20Ser) | | | GGATGAAGTTGGTGGTGAGGCC′] |
| 3935 | NM_000518.4(HBB): c.−81A > G | 3043 | HBB | [′GGGAGGGCAGGAGCCAGGGCTGGGCVTA |
| | | | | AAAGTCAGGGCAGAGCCATCTAT′] |
| 3936 | NM_000518.4(HBB): | 3043 | HBB | [′GAGGGCAGGAGCCAGGGCTGGGCATRAAA |
| | c.−50 − 29A > G | | | GTCAGGGCAGAGCCATCTATTG′] |
| 3937 | NM_000518.4(HBB): c.−78A > G | 3043 | HBB | [′AGGGCAGGAGCCAGGGCTGGGCATAVAA |
| | | | | GTCAGGGCAGAGCCATCTATTGC′] |
| 3938 | NM_000518.4(HBB): c.*113A > G | 3043 | HBB | [′TGAGCATCTGGATTCTGCCTAATAARAAAC |
| | | | | ATTTATTTTCATTGCAATGAT′] |
| 3939 | NM_000518.4(HBB): c.*112A > G | 3043 | HBB | [′TTGAGCATCTGGATTCTGCCTAATADAAAA |
| | | | | CATTTATTTTCATTGCAATGA′] |
| 3940 | NM_000518.4(HBB): c.*111A > G | 3043 | HBB | [′CTTGAGCATCTGGATTCTGCCTAATRAAAA |
| | | | | ACATTTATTTTCATTGCAATG′] |
| 3941 | NM_000518.4(HBB): c.80A > G | 3043 | HBB | [′GTGAACGTGGATGAAGTTGGTGGTGNGGC |
| | (p.Glu27Gly) | | | CCTGGGCAGGTTGGTATCAAGG′] |
| 3942 | NM_000518.4(HBB): c.247A > G | 3043 | HBB | [′TGGCCTGGCTCACCTGGACAACCTCVAGG |
| | (p.Lys83Glu) | | | GCACCTTTGCCACACTGAGTGA′] |
| 3943 | NM_000517.4(HBA2): c.1A > G | 3040 | HBA2 | [′CCCACAGACTCAGAGAGAACCCACCRTGG |
| | (p.Met1Val) | | | TGCTGTCTCCTGCCGACAAGAC′] |
| 3944 | NM_000517.4(HBA2): c.*92A > G | 3040 | HBA2 | [′CACCGGCCCTTCCTGGTCTTTGAATRAAGT |
| | | | | CTGAGTGGGCAGCAGCCTGTG′] |
| 3945 | NM_000517.4(HBA2): | 3040 | HBA2 | [′CACCCCTCACTCTGCTTCTCCCCGCRGGAT |
| | c.96 − 2A > G | | | GTTCCTGTCCTTCCCCACCAC′] |
| 3946 | NM_006121.3(KRT1): c.1445A > G | 3848 | KRT1 | [′GCCCTGGATCTGGAGATTGCCACCTRCAG |
| | (p.Tyr482Cys) | | | GACCCTCCTGGAGGGAGAAGAA′] |
| 3947 | NM_001077488.3(GNAS): c.1A > G | 2778 | GNAS | [′GCGCCCCGCCGCCGCCGCCGCCGCCRTGG |
| | (p.Met1Val) | | | GCTGCCTCGGGAACAGTAAGAC′] |
| 3948 | NM_000516.5(GNAS): c.680A > G | 2778 | GNAS | [′ACCAGCATGTTTGACGTGGGTGGCCDGCG |
| | (p.Gln227Arg) | | | CGATGAACGCCGCAAGTGGATC′] |
| 3949 | NM_000515.4(GH1): c.413A > G | 2688 | GH1 | [′GGCGCCTCTGACAGCAACGTCTATGRCCTC |
| | (p.Asp138Gly) | | | CTAAAGGACCTAGAGGAAGGC′] |
| 3950 | NM_000823.3(GHRHR): c.985A > G | 2692 | GHRHR | [′TTGTCTTTCCTGCAGGCGTCTCTCCRAGTC |
| | (p.Lys329Glu) | | | GACACTTTTCCTGATCCCACT′] |
| 3951 | NM_002890.2(RASA1): | 5921 | RASA1 | [′GACCAATGAAAATATTCAGCGATTTRAAA |
| | c.1198A > G (p.Lys400Glu) | | | TATGTCCAACGCCAAACAATCA′] |
| 3952 | NM_002890.2(RASA1): | 5921 | RASA1 | [′CAATGAAAATATTCAGCGATTTAAARTAT |
| | c.1201A > G (p.Ile401Val) | | | GTCCAACGCCAAACAATCAGTT′] |
| 3953 | NM_000406.2(GNRHR): c.317A > G | 2798 | GNRHR | [′GATGGGATGTGGAACATTACAGTCCRATG |
| | (p.Gln106Arg) | | | GTATGCTGGAGAGTTACTCTGC′] |
| 3954 | NM_000406.2(GNRHR): c.851A > G | 2798 | GNRHR | [′TTTACTGTCTGCTGGACTCCCTACTRTGTC |
| | (p.Tyr284Cys) | | | CTAGGAATTTGGTATTGGTTT′] |
| 3955 | NM_000407.4(GP1BB): c.338A > G | −1 | — | [′GCCGGCCGCCCCGAGCGTGCGCCCTDCCG |
| | (p.Tyr113Cys) | | | CGACCTGCGTTGCGTGGCGCCC′] |
| 3956 | NM_021957.3(GYS2): c.116A > G | 2998 | GYS2 | [′TTTGAAGTTGCTTGGGAAGTGACCARTAA |
| | (p.Asn39Ser) | | | AGGTTTGTACTGCTCCTGAAGG′] |
| 3957 | NM_001146040.1(GLRA1): | 2741 | GLRA1 | [′CCTCCACCCCCACTCTAGGTGTCCTVTGTG |
| | c.920A > G (p.Tyr307Cys) | | | AAAGCCATTGACATTTGGATG′] |
| 3958 | NM_001146040.1(GLRA1): | 2741 | GLRA1 | [′CTCCGGCTCTCGAGCATCTCTGCCCRAGGT |
| | c.910A > G (p.Lys304Glu) | | | AAGTCCCATTGCCCAAGAGCA′] |
| 3959 | NM_000171.3(GLRA1): c.523A > G | 2741 | GLRA1 | [′CCCCATGGACTTGAAGAATTTCCCCRTGGA |
| | (p.Met175Val) | | | TGTCCAGACATGTATCATGCA′] |
| 3960 | NM_000162.3(GCK): c.641A > G | 2645 | GCK | [′ACGGTGGCCACGATGATCTCCTGCTRCTAC |
| | (p.Tyr214Cys) | | | GAAGACCATCAGTGCGAGGTC′] |
| 3961 | NM_000145.3(FSHR): c.1345A > G | 2492 | FSHR | [′AGGCTGTGATGCTGCTGGCTTTTTCRCTGT |
| | (p.Thr449Ala) | | | CTTTGCCAGTGAGCTGTCAGT′] |
| 3962 | NM_182925.4(FLT4): c.3104A > G | 2324 | FLT4 | [′CGCCTCCCCGCACCCCAGTGCATCCRCAGA |
| | (p.His 1035Arg) | | | GACCTGGCTGCTCGGAACATT′] |
| 3963 | NM_023110.2(FGFR1): | 2260 | FGFR1 | [′CCGGCAGTGATGACCTCGCCCCTGTRCCTG |
| | c.1121A > G (p.Tyr374Cys) | | | GAGATCATCATCTATTGCACA′] |
| 3964 | NM_006894.5(FMO3): c.182A > G | 2328 | FMO3 | [′AGCATTTACAAATCAGTCTTTTCCARCTCT |
| | (p.Asn61Ser) | | | TCCAAAGAGATGATGTGTTTC′] |
| 3965 | NM_001002294.2(FMO3): | 2328 | FMO3 | [′AAGCCTAACGTGAAGGAATTCACAGRGAC |
| | c.923A > G (p.Glu308Gly) | | | CTCGGCCATTTTTGAGGATGGG′] |
| 3966 | NM_212482.1(FN1): c.2918A > G | 2335 | FN1 | [′ACCGGGCTGTCCCCTGGGGTCACCTRTTAC |
| | (p.Tyr973Cys) | | | TTCAAAGTCTTTGCAGTGAGC′] |
| 3967 | NM_000142.4(FGFR3): | 2261 | FGFR3 | [′CGTGCACAACCTCGACTACTACAAGVAGA |
| | c.1948A > G (p.Lys650Glu) | | | CAACCAACGTGAGCCCGGCCCT′] |
| 3968 | NM_000142.4(FGFR3): c.1118A > G | 2261 | FGFR3 | [′GAGGCTGACGAGGCGGGCAGTGTGTRTGC |
| | (p.Tyr373Cys) | | | AGGCATCCTCAGCTACGGGGTG′] |
| 3969 | NM_000142.4(FGFR3): c.1612A > G | 2261 | FGFR3 | [′GTGCAGGCGCCCAGCAGGTTGATGAYGTT |
| | (p.Ile538Val) | | | TTTGTGTTTCCCGATCATCTTC′] |
| 3970 | NM_000142.4(FGFR3): c.1619A > G | 2261 | FGFR3 | [′GCCCTGCGTGCAGGCGCCCAGCAGGBTGA |
| | (p.Asn540Ser) | | | TGATGTTTTTGTGTTTCCCGAT′] |
| 3971 | NM_000142.4(FGFR3): c.833A > G | 2261 | FGFR3 | [′GACGTGGAGTTCCACTGCAAGGTGTRCAG |
| | (p.Tyr278Cys) | | | TGACGCACAGCCCCACATCCAG′] |
| 3972 | NM_000138.4(FBN1): c.6431A > G | 2200 | FBN1 | [′GTCTGTAAACATGGACAGTGCATCARTAC |
| | (p.Asn2144Ser) | | | AGATGGTTCCTATCGCTGCGAG′] |
| 3973 | NM_000138.4(FBN1): c.3128A > G | 2200 | FBN1 | [′ATACCCAGCCTCTGCACCCACGGCARGTG |
| | (p.Lys1043Arg) | | | CAGAAACACCATTGGCAGCTTT′] |
| 3974 | NM_000138.4(FBN1): c.2261A > G | 2200 | FBN1 | [′TATAAATGTATATGCAATTCAGGATRTGAA |
| | (p.Tyr754Cys) | | | GTGGATTCAACTGGGAAAAAC′] |
| 3975 | NM_000146.3(FTL): c.−160A > G | 2512 | FTL | [′CCGCGGGTCTGTCTCTTGCTTCAACRGTGT |
| | | | | TTGGACGGAACAGATCCGGGG′] |
| 3976 | NM_000043.4(FAS): c.695A > G | 355 | FAS | [′TTTTCAGATGTTGACTTGAGTAAATRTATC |
| | (p.Tyr232Cys) | | | ACCACTATTGCTGGAGTCATG′] |
| 3977 | NM_000043.4(FAS): c.763A > G | 355 | FAS | [′AGGCTTTGTTCGAAAGAATGGTGTCRATG |
| | (p.Asn255Asp) | | | AAGCCAAAATAGATGAGATCAA′] |
| 3978 | NM_000043.4(FAS): c.353A > G | 355 | FAS | [′TTTCTAGGCTTAGAAGTGGAAATAARCTGC |
| | (p.Asn118Ser) | | | ACCCGGACCCAGAATACCAAG′] |
| 3979 | NM_000129.3(F13A1): c.851A > G | 2162 | F13A1 | [′CTCGTTGGATCCTGGGACAATATCTRTGCC |
| | (p.Tyr284Cys) | | | TATGGCGTCCCCCCATCGGCC′] |
| 3980 | NM_000121.3(EPOR): c.1460A > G | 2057 | EPOR | [′GGCTTATCCGATGGCCCCTACTCCARCCCT |
| | (p.Asn487Ser) | | | TATGAGAACAGCCTTATCCCA′] |
| 3981 | NM_207034.2(EDN3): c.335A > G | 1908 | EDN3 | [′GACAAGGAGTGTGTCTACTATTGCCRCCTG |
| | (p.His112Arg) | | | GACATCATTTGGATCAACACT′] |
| 3982 | NM_001257988.1(TYMP): | 1890 | TYMP | [′CAGAGCGGACAGCCCCTCCACGAGTYTCT |
| | c.665A > G (p.Lys222Arg) | | | TACTGAGAATGGAGGCTTTGGG′] |
| 3983 | NM_003286.2(TOP1): c.1598A > G | −1 | — | [′GTAGAGTTTGACTTCCTCGGGAAGGRCTCC |
| | (p.Asp533Gly) | | | ATCAGATACTATAACAAGGTC′] |
| 3984 | NM_001943.3(DSG2): c.797A > G | 1829 | DSG2 | [′GTTCAGATTCGTATTTTGGATGTCARTGAC |
| | (p.Asn266Ser) | | | AATATACCTGTAGTAGAAAAT′] |
| 3985 | NM_001943.3(DSG2): | 1829 | DSG2 | [′TCTGTGTTCAATTTTGTGTCTGTACRGTGG |
| | c.1880 − 2A > G | | | TACCACTTTTACTGCTGATGT′] |
| 3986 | NM_024422.4(DSC2): | 1824 | DSC2 | [′TTTCTCCTTATTTTACTCTCTTCACRGATAA |
| | c.631 − 2A > G | | | TTGCCTTTGCAACAACTCCA′] |
| 3987 | NG_012088.1: g.2209A > G | 3586 | IL10 | [′CCAGGATGGTCTCGATCTCCTGACCYTATG |
| | | | | ATCCGCCCGCCTTGGCCTCCC′] |
| 3988 | NM_000498.3(CYP11B2): | −1 | — | [′GAGGCCTGGCACGTCCCCCCTCCTCRCTTT |
| | c.1492A > G (p.Thr498Ala) | | | CAGAGCGATTAACTAGTCTTG′] |
| 3989 | NM_000941.2(POR): c.1733A > G | 5447 | POR | [′CGCCGCTCGGATGAGGACTACCTGTRCCG |
| | (p.Tyr578Cys) | | | GGAGGAGCTGGCGCAGTTCCAC′] |
| 3990 | NM_000941.2(POR): c.15A > G | 5447 | POR | [′CTAACAGTTTCATGATCAACATGGGRGACT |
| | (p.Gly5=) | | | CCCACGTGGACACCAGCTCCA′] |
| 3991 | NM_001885.2(CRYAB): c.358A > G | 1410 | CRYAB | [′TGGTTTCATCTCCAGGGAGTTCCACRGGAA |
| | (p.Arg120Gly) | | | ATACCGGATCCCAGCTGATGT′] |
| 3992 | NM_021954.3(GJA3): c.188A > G | 2700 | GJA3 | [′AACACCCAGCAGCCGGGCTGCGAGARCGT |
| | (p.Asn63Ser) | | | CTGCTACGACAGGGCCTTCCCC′] |
| 3993 | NM_004004.5(GJB2): c.218A > G | 2706 | GJB2 | [′TACGATCACTACTTCCCCATCTCCCRCATC |
| | (p.His73Arg) | | | CGGCTATGGGCCCTGCAGCTG′] |
| 3994 | NM_001735.2(C5): c.1115A > G | 727 | C5 | [′CGTCTACCCCCTCACCCAATCTACCYTGAT |
| | (p.Lys372Arg) | | | GGGATATGGAATCCCAGGCTT′] |
| 3995 | NM_001848.2(COL6A1): | 1291 | COL6A1 | [′CTCAAAAGCAGCGTGGACGCGGTCARGTA |
| | c.362A > G (p.Lys121Arg) | | | CTTTGGGAAGGGCACCTACACC′] |
| 3996 | NM_000093.4(COL5A1): | 1289 | COL5A1 | [′TTTTCATGAGCGTCTCTTCTTTTCCRGGGTG |
| | c.655 − 2A > G | | | ACATCCAGCAGCTGCTCTTT′] |
| 3997 | NM_000089.3(COL1A2): | 1278 | COL1A2 | [′TATAATTTTTTTTTTTTACTTCTCTRGAACT |
| | c.226 − 2A > G | | | TTGCTGCTCAGTATGATGGA′] |
| 3998 | NM_000089.3(COL1A2): | 1278 | COL1A2 | [′GAGTGGGTACATTCTGAAAAGTAATRTAA |
| | c.70 + 717A > G | | | GTGTCTCAATTCACTTTCTAGT′] |
| 3999 | NM_001844.4(COL2A1): | 1280 | COL2A1 | [′ACGGAAGGCTCCCAGAACATCACCTRCCA |
| | c.4172A > G (p.Tyr1391Cys) | | | CTGCAAGAACAGCATTGCCTAT′] |
| 4000 | NM_001844.4(COL2A1): | 1280 | COL2A1 | [′CGGTCTGCCTGGGCAACGTGGTGAGRGAG |
| | c.2974A > G (p.Arg992Gly) | | | GATTCCCTGGCTTGCCTGGCCC′] |
| 4001 | NM_000493.3(COL10A1): | −1 | — | [′TTTACTTGTCAGATACCAGGAATATRCTAT |
| | c.1790A > G (p.Tyr597Cys) | | | TTTTCATACCACGTGCATGTG′] |
| 4002 | NM_004385.4(VCAN): | 1462 | VCAN | [′GTATTGTGAAAACTCTGTTTTTTTCDGGTC |
| | c.4004 − 2A > G | | | GAATGAGTGATTTGAGTGTAA′] |
| 4003 | NM_020549.4(CHAT): c.1444A > G | 1103 | CHAT | [′CGTCAGCGAGCTCCCCGCCCCCCGGVGGC |
| | (p.Arg482Gly) | | | TGCGGTGGAAATGCTCCCCGGA′] |
| 4004 | NM_000078.2(CETP): c.1376A > G | 1071 | CETP | [′AACAGCAAAGGCGTGAGCCTCTTCGRCAT |
| | (p.Asp459Gly) | | | CATCAACCCTGAGATTATCACT′] |
| 4005 | NM_000083.2(CLCN1): | 1180 | CLCN1 | [′GTGATTTGCTTCGAATTAACGGGTCDGATT |
| | c.1655A > G (p.Gln552Arg) | | | GCTCACATCCTGCCCATGATG′] |
| 4006 | NM_000083.2(CLCN1): c.382A > G | 1180 | CLCN1 | [′CTTTCTGGTGCTTCTGGGACTGCTGRTGGC |
| | (p.Met128Val) | | | TCTGGTCAGCTGGAGCATGGA′] |
| 4007 | NM_199440.1(HSPD1): c.86A > G | 3329 | HSPD1 | [′CATCTCACTCGGGCTTATGCCAAAGRTGTA |
| | (p.Asp29Gly) | | | AAATTTGGTGCAGATGCCCGA′] |
| 4008 | NM_001904.3(CTNNB1): c.95A > G | 1499 | CTNNB1 | [′CACTGGCAGCAACAGTCTTACCTGGNCTCT |
| | (p.Asp32Gly) | | | GGAATCCATTCTGGTGCCACT′] |
| 4009 | NM_001904.3(CTNNB1): | 1499 | CTNNB1 | [′CTCTGGAATCCATTCTGGTGCCACTNCCAC |
| | c.121A > G (p.Thr41Ala) | | | AGCTCCTTCTCTGAGTGGTAA′] |
| 4010 | NM_007294.3(BRCA1): c.211A > G | 672 | BRCA1 | [′TTTATGTAAGAATGATATAACCAAARGGT |
| | (p.Arg71Gly) | | | ATATAATTTGGTAATGATGCTA′] |
| 4011 | NM_001202.3(BMP4): c.278A > G | 652 | BMP4 | [′GATCTTTACCGGCTTCAGTCTGGGGRGGAG |
| | (p.Glu93Gly) | | | GAGGAAGAGCAGATCCACAGC′] |
| 4012 | NM_000342.3(SLC4A1): | 6521 | SLC4A1 | [′CACCACATCACACCCGGGTACCCACRAGG |
| | c.166A > G (p.Lys56Glu) | | | TGAGGACCCCAGCCTCCTCCGT′] |
| 4013 | NM_000342.3(SLC4A1): | 6521 | SLC4A1 | [′GAAGACCTGGCGCATGCACTTATTCRCGG |
| | c.2509A > G (p.Thr837Ala) | | | GCATCCAGATCATCTGCCTGGC′] |
| 4014 | NM_001681.3(ATP2A2): | 488 | ATP2A2 | [′TTCATCCGCTACCTCATCTCGTCCARCGTC |
| | c.2300A > G (p.Asn767Ser) | | | GGGGAAGTTGTCTGGTAGGTC′] |
| 4015 | NM_000486.5(AQP2): c.203A > G | 359 | AQP2 | [′GGCCACATAAGCGGGGCCCACATCAVCCC |
| | (p.Asn68Ser) | | | TGCCGTGACTGTGGCCTGCCTG′] |
| 4016 | NM_000041.3(APOE): | 348 | APOE | [′GACACCCTCCCGCCCTCTCGGCCGCRGGGC |
| | c.237 − 2A > G | | | GCTGATGGACGAGACCATGAA′] |
| 4017 | NM_000041.3(APOE): c.490A > G | 348 | APOE | [′CGCCTCCCACCTGCGCAAGCTGCGTVAGC |
| | (p.Lys164Glu) | | | GGCTCCTCCGCGATGCCGATGA′] |
| 4018 | NM_000041.3(APOE): c.178A > G | 348 | APOE | [′TTGGGATTACCTGCGCTGGGTGCAGRCACT |
| | (p.Thr60Ala) | | | GTCTGAGCAGGTGCAGGAGGA′] |
| 4019 | NM_000040.1(APOC3): c.280A > G | 345 | APOC3 | [′GGATTTGGACCCTGAGGTCAGACCARCTTC |
| | (p.Thr94Ala) | | | AGCCGTGGCTGCCTGAGACCT′] |
| 4020 | NM_000040.1(APOC3): c.232A > G | 345 | APOC3 | [′CCTGAAAGACTACTGGAGCACCGTTRAGG |
| | (p.Lys78Glu) | | | ACAAGTTCTCTGAGTTCTGGGA′] |
| 4021 | NM_001042425.1(TFAP2A): | 7020 | TFAP2A | [′GTCGCTGCTGGGCGGAGTGCTCCGGVGGT |
| | c.751A > G (p.Arg251Gly) | | | GAGGCCCGGCACGGCCCCGCCC′] |
| 4022 | NM_000488.3(SERPINC1): | 462 | SERPINC1 | [′TGCAGAGCAATCCAGAGCGGCCATCRACA |
| | c.655A > G (p.Asn219Asp) | | | AATGGGTGTCCAATAAGACCGA′] |
| 4023 | NM_001085.4(SERPINA3): | 12 | SERPINA3 | [′TACAGACACCCAGAACATCTTCTTCRTGAG |
| | c.1240A > G (p.Met414Val) | | | CAAAGTCACCAATCCCAAGCA′] |
| 4024 | NM_001148.4(ANK2): c.4373A > G | 287 | ANK2 | [′TGCATGGCATCTTGGGGCGGAAAGGRATC |
| | (p.Glu1458Gly) | | | AGAGTCAGATCAAGAACAGGAG′] |
| 4025 | NM_001145.4(ANG): c.121A > G | −1 | — | [′CTTCCTGACCCAGCACTATGATGCCRAACC |
| | (p.Lys41Glu) | | | ACAGGGCCGGGATGACAGATA′] |
| 4026 | NM_001145.4(ANG): c.208A > G | −1 | — | [′ACCCTGCAAAGACATCAACACATTTRTTCA |
| | (p.Ile70Val) | | | TGGCAACAAGCGCAGCATCAA′] |
| 4027 | NM_000484.3(APP): c.2146A > G | 351 | APP | [′GGGCGGTGTTGTCATAGCGACAGTGRTCG |
| | (p.Ile716Val) | | | TCATCACCTTGGTGATGCTGAA′] |
| 4028 | NM_000484.3(APP): c.2078A > G | 351 | APP | [′TTTGTTTTCAAGGTGTTCTTTGCAGRAGAT |
| | (p.Glu693Gly) | | | GTGGGTTCAAACAAAGGTGCA′] |
| 4029 | NM_000484.3(APP): c.2140A > G | 351 | APP | [′CATGGTGGGCGGTGTTGTCATAGCGRCAG |
| | (p.Thr714Ala) | | | TGATCGTCATCACCTTGGTGAT′] |
| 4030 | NM_000021.3(PSEN1): c.488A > G | 5663 | PSEN1 | [′AAATGCTTTCTTTTCTAGGTCATCCRTGCC |
| | (p.His163Arg) | | | TGGCTTATTATATCATCTCTA′] |
| 4031 | NM_000021.3(PSEN1): c.415A > G | 5663 | PSEN1 | [′GCACTCAATTCTGAATGCTGCCATCRTGAT |
| | (p.Met139Val) | | | CAGTGTCATTGTTGTCATGAC′] |
| 4032 | NM_000021.3(PSEN1): c.436A > G | 5663 | PSEN1 | [′CATCATGATCAGTGTCATTGTTGTCNTGAC |
| | (p.Met146Val) | | | TATCCTCCTGGTGGTTCTGTA′] |
| 4033 | NM_000021.3(PSEN1): c.839A > G | 5663 | PSEN1 | [′GTTGAAACAGCTCAGGAGAGAAATGVAAC |
| | (p.Glu280Gly) | | | GCTTTTTCCAGCTCTCATTTAC′] |
| 4034 | NM_000021.3(PSEN1): c.998A > G | 5663 | PSEN1 | [′CAAGACACTGTTGCAGAGAATGATGRTGG |
| | (p.Asp333Gly) | | | CGGGTTCAGTGAGGAATGGGAA′] |
| 4035 | NM_000034.3(ALDOA): c.386A > G | 226 | ALDOA | [′CCCCTTCCTCTTCTCTTAGGGTTGGRTGGG |
| | (p.Asp129Gly) | | | CTGTCTGAGCGCTGTGCCCAG′] |
| 4036 | NM_000477.5(ALB): | 213 | ALB | [′CATTTTGATTGGCGATTTTCTTTTTDGGGC |
| | c.714 − 2A > G | | | AGTAGCTCGCCTGAGCCAGAG′] |
| 4037 | NM_001151.3(SLC25A4): | 291 | SLC25A4 | [′AAGCAGCTCTTCTTAGGGGGTGTGGRTCG |
| | c.311A > G (p.Asp104Gly) | | | GCATAAGCAGTTCTGGCGCTAC′] |
| 4038 | NM_013411.4(AK2): c.1A > G | 204 | AK2 | [′GTGGCAGTGAGAGACTTCGGCGGACRTGG |
| | (p.Met1Val) | | | CTCCCAGCGTGCCAGCGGCAGA′] |
| 4039 | NM_013411.4(AK2): c.494A > G | 204 | AK2 | [′AACCCTCCAAAAGAGCCCATGAAAGRTGA |
| | (p.Asp165Gly) | | | CGTATGTAAACTCAGGACAAAA′] |
| 4040 | NM_000476.2(AK1): c.491A > G | 203 | AK1 | [′GCCACAGAACCCGTCATCGCCTTCTRTGAG |
| | (p.Tyr164Cys) | | | AAACGTGGCATTGTGCGCAAG′] |
| 4041 | NM_001100.3(ACTA1): c.350A > G | 58 | ACTA1 | [′GAGGCCCCCCTCAATCCCAAGGCCARCCG |
| | (p.Asn117Ser) | | | CGAGAAGATGACCCAGATCATG′] |
| 4042 | NM_001103.3(ACTN2): c.26A > G | 88 | ACTN2 | [′ATGAACCAGATAGAGCCCGGCGTGCRGTA |
| | (p.Gln9Arg) | | | CAACTACGTGTACGACGAGGAT′] |
| 4043 | NM_005159.4(ACTC1): | −1 | — | [′CAGCAAATGTGGATTAGCAAGCAAGRGTA |
| | c.1088A > G (p.Glu363Gly) | | | CGATGAGGCAGGCCCATCCATT′] |
| 4044 | NM_005159.4(ACTC1): c.373A > G | −1 | — | [′CAACCGGGAGAAGATGACTCAGATCRTGT |
| | (p.Met125Val) | | | TTGAGACCTTCAATGTCCCTGC′] |
| 4045 | NM_018109.3(MTPAP): | 55149 | MTPAP | [′TGATTCTTCTCCTCTGTACATTCAGRATCC |
| | c.1432A > G (p.Asn478Asp) | | | ATTTGAAACTTCTCTCAACAT′] |
| 4046 | NM_016955.3(SEPSECS): | 51091 | SEPSECS | [′TTATTGTCACTTGGATCAAATGGCTRTAAG |
| | c.1001A > G (p.Tyr334Cys) | | | AAGCTACTAAAAGAAAGAAAG′] |
| 4047 | NM_014053.3(FLVCR1): | 28982 | FLVCR1 | [′GATCTTCAGCCTGTACTCGCTGGTCRACGC |
| | c.361A > G (p.Asn121Asp) | | | CTTTCAGTGGATCCAGTACAG′] |
| 4048 | NM_000021.3(PSEN1): c.697A > G | 5663 | PSEN1 | [′ATATCTCATTATGATTAGTGCCCTCDTGGC |
| | (p.Met233Val) | | | CCTGGTGTTTATCAAGTACCT′] |
| 4049 | NM_000207.2(INS): c.323A > G | −1 | — | [′TGCTCCCTCTACCAGCTGGAGAACTRCTGC |
| | (p.Tyr108Cys) | | | AACTAGACGCAGCCCGCAGGC′] |
| 4050 | NM_000334.4(SCN4A): | 6329 | SCN4A | [′GAAGCAGGCCTTCGACATCACCATCRTGA |
| | c.4078A > G (p.Met1360Val) | | | TCCTCATCTGCCTCAACATGGT′] |
| 4051 | NM_000334.4(SCN4A): | 6329 | SCN4A | [′CCTCATCTGCCTCAACATGGTCACCRTGAT |
| | c.4108A > G (p.Met1370Val) | | | GGTGGAGACAGACAACCAGAG′] |
| 4052 | NM_000518.4(HBB): | 3043 | HBB | [′TTCATACCTCTTATCTTCCTCCCACVGCTCC |
| | c.316 − 2A > G | | | TGGGCAACGTGCTGGTCTGT′] |
| 4053 | NM_000525.3(KCNJ11): | 3767 | KCNJ11 | [′GTGGCCCACAAGAACATCCGGGAGCRGGG |
| | c.155A > G (p.Gln52Arg) | | | CCGCTTCCTGCAGGACGTGTTC′] |
| 4054 | NM_000525.3(KCNJ11): | 3767 | KCNJ11 | [′AGCCCACCGCAGGGCTGAGACCCTCRTCTT |
| | c.544A > G (p.Ile182Val) | | | CAGCAAGCATGCGGTGATCGC′] |
| 4055 | NM_000525.3(KCNJ11): | 3767 | KCNJ11 | [′GGAAGGCGTGGTGGAAACCACGGGCVTCA |
| | c.886A > G (p.Ile296Val) | | | CCACCCAGGCCCGCACCTCCTA′] |
| 4056 | NM_000525.3(KCNJ11): | 3767 | KCNJ11 | [′GAGGACGGACGTTACTCTGTGGACTRCTCC |
| | c.989A > G (p.Tyr330Cys) | | | AAGTTTGGCAACACCGTCAAA′] |
| 4057 | NM_000528.3(MAN2B1): | 4125 | MAN2B1 | [′CCCATCTGTGGACCCTTTTCTGCCCRGCAC |
| | c.1831 − 2A > G | | | ATCCGGGCAACGTTTGATCCT′] |
| 4058 | NM_000639.2(FASLG): c.466A > G | 356 | FASLG | [′ATTTATTTCAGGCAAGTCCAACTCARGGTC |
| | (p.Arg156Gly) | | | CATGCCTCTGGAATGGGAAGA′] |
| 4059 | NM_000920.3(PC): c.1705A > G | 5091 | PC | [′CCCGGGGCTGCTGCTGATGGACACGRCCTT |
| | (p.Thr569Ala) | | | CAGGGACGCCCACCAGTCACT′] |
| 4060 | NM_001017420.2(ESCO2): | 157570 | ESCO2 | [′AATGGGTTTCTTTTTTTACCCCCCARTTATA |
| | c.1132 − 7A > G | | | GGACGCTGGTCAGAAACATT′] |
| 4061 | NM_001017420.2(ESCO2): | 157570 | ESCO2 | [′ATTAAATCATCTTTTCTTCTCTTTTRGGAAT |
| | 2c.1674 − A > G | | | TGCTTCATGTTTGGCTGTTT′] |
| 4062 | NM_001129765.1(NSDHL): | 50814 | NSDHL | [′GAGAGAGCCAAAAAGGCCATGGGCTVCCA |
| | c.1046A > G (p.Tyr349Cys) | | | GCCACTAGTGACCATGGATGAT′] |
| 4063 | NM_001701.3(BAAT): c.967A > G | 570 | BAAT | [′AGAGGCCCAGGGGCAATTCCTCTTCRTTGT |
| | (p.Ile323Val) | | | AGGAGAAGGTGATAAGACTAT′] |
| 4064 | NM_002977.3(SCN9A): c.406A > G | 6335 | SCN9A | [′ATTCAGCATGCTCATCATGTGCACTRTTCT |
| | (p.Ile136Val) | | | GACAAACTGCATATTTATGAC′] |
| 4065 | NM_004004.5(GJB2): c.487A > G | 2706 | GJB2 | [′CTATGTCATGTACGACGGCTTCTCCRTGCA |
| | (p.Met163Val) | | | GCGGCTGGTGAAGTGCAACGC′] |
| 4066 | NM_004519.3(KCNQ3): | 3786 | KCNQ3 | [′GAACCAAAGCCTGTTGGCTTAAACARTAA |
| | c.1403A > G (p.Asn468Ser) | | | AGAGCGTTTCCGCACGGCCTTC′] |
| 4067 | NM_004519.3(KCNQ3): | 3786 | KCNQ3 | [′AGAGATGATTATGTGTTCGGCCCCARTGG |
| | c.2462A > G (p.Asn821Ser) | | | GGGGTCGAGCTGGATGAGGGAG′] |
| 4068 | NM_004519.3(KCNQ3): c.914A > G | 3786 | KCNQ3 | [′AAAGAGGAGTTTGAGACCTATGCAGRTGC |
| | (p.Asp305Gly) | | | CCTGTGGTGGGGCCTGGTGAGT′] |
| 4069 | NM_004525.2(LRP2): | 4036 | LRP2 | [′TGTAACTCTCTCTTTTTCCCCCCACRGAAA |
| | c.770 − 2A > G | | | GCGGTCCTCATGATGTTCATA′] |
| 4070 | NM_007375.3(TARDBP): c.1055A | 23435 | TARDBP | [′CAGAACCAGTCAGGCCCATCGGGTARTAA |
| | > G (p.Asn352Ser) | | | CCAAAACCAAGGCAACATGCAG′] |
| 4071 | NM_007375.3(TARDBP): c.800A > | 23435 | TARDBP | [′AATGCCGAACCTAAGCACAATAGCARTAG |
| | G (p.Asn267Ser) | | | ACAGTTAGAAAGAAGTGGAAGA′] |
| 4072 | NM_012434.4(SLC17A5): c.406A > | 26503 | SLC17A5 | [′ATATGTTGCCAGCAAAATAGGGGGGDAAA |
| | G (p.Lys136Glu) | | | TGCTGCTAGGATTTGGGATCCT′] |
| 4073 | NM_012463.3(ATP6V0A2): | 23545 | ATP6V0A | [′AGACTGTGTTCAACTCTTGTCTTCCRGCTA |
| | c.732 − 2A > G | | 2 | CCACTGCCACGTGTACCCCTA′] |
| 4074 | NM_014043.3(CHMP2B): c.85A > G | 25978 | CHMP2B | [′GTTACGAGGTACACAGAGGGCTATARTCA |
| | (p.Ile29Val) | | | GAGATCGAGCAGCTTTAGAGAA′] |
| 4075 | NM_018136.4(ASPM): | 25926 | ASPM | [′AGCAAAATTATAATATTGGAATATARTATC |
| | c.2761 − 25A > G | 6 | | TGGAACTTATTTCTTTATAGG′] |
| 4076 | NM_022081.5(HPS4): c.461A > G | 89781 | HPS4 | [′ATTCTGAAAAACACCAGTGATCTGCRTAA |
| | (p.His154Arg) | | | GATTTTCAATTCCCTCTGGAAC′] |
| 4077 | NM_024649.4(BBS1): | −1 | — | [′GTCAGCCTCTGGGACCCTTCTCCACRGCCA |
| | c.1340 − 2A > G | | | TGCACCGGGCCTTCCAGACAG′] |
| 4078 | NM_032520.4(GNPTG): | 84572 | GNPTG | [′TGCTGCCCCTGCATCCTCCACCTTCRGGGC |
| | 2c.610 − A > G | | | CATGAGAAGTTGCTGAGGACA′] |
| 4079 | NM_172107.2(KCNQ2): c.1A > G | 3785 | KCNQ2 | [′CCCGGGGCGCCTCCCGCCAGGCACCRTGG |
| | (p.Met1Val) | | | TGCAGAAGTCGCGCAACGGCGG′] |
| 4080 | NM_172107.2(KCNQ2): c.356A > G | 3785 | KCNQ2 | [′GTGTTTTCCACCATCAAGGAGTATGRGAA |
| | (p.Glu119Gly) | | | GAGCTCGGAGGGGGCCCTCTAC′] |
| 4081 | NM_172107.2(KCNQ2): c.622A > G | 3785 | KCNQ2 | [′CCTGCGCTTCCTGCAGATTCTGCGGRTGAT |
| | (p.Met208Val) | | | CCGCATGGACCGGCGGGGAGG′] |
| 4082 | NM_172107.2(KCNQ2): c.635A > G | 3785 | KCNQ2 | [′CAGATTCTGCGGATGATCCGCATGGRCCG |
| | (p.Asp212Gly) | | | GCGGGGAGGCACCTGGAAGCTG′] |
| 4083 | NM_172107.2(KCNQ2): c.773A > G | 3785 | KCNQ2 | [′GTGTACTTGGCAGAGAAGGGGGAGARCGA |
| | (p.Asn258Ser) | | | CCACTTTGACACCTACGCGGAT′] |
| 4084 | NM_172107.2(KCNQ2): | 3785 | KCNQ2 | [′ATGCTTTGGGGTCTCTGTTCCCGGTRGAGT |
| | c.1764 − 2A > G | | | GGACCAGATCGTGGGGCGGGG′] |
| 4085 | NM_000495.4(COL4A5): c.1A > G | 1287 | COL4A5 | [′AAGGAGCTGCGGGAGCCGGAGAAGARTG |
| | (p.Met1Val) | | | AAACTGCGTGGAGTCAGCCTGGC′] |
| 4086 | NM_000495.4(COL4A5): | 1287 | COL4A5 | [′AGAACTTCCATTGATGGCTTCTTTTRGGGT |
| | 2c.466 − A > G | | | GAACCAGGTAGTATAATTATG′] |
| 4087 | NM_000495.4(COL4A5): | 1287 | COL4A5 | [′TCATTTTCTTTACTCACTTTATAACRGGGC |
| | c.547 − 2A > G | | | CTACCTGGTCCCACTGGTATA′] |
| 4088 | NM_000495.4(COL4A5): | 1287 | COL4A5 | [′ATTTTCTCTTTTGTCTTCTCTTCTTRGGGCC |
| | c.610 − 2A > G | | | CTCCTGGTCCACCAGGACTT′] |
| 4089 | NM_000495.4(COL4A5): | 1287 | COL4A5 | [′GCCCTATCATTTCTTTGTATCCTATRGGGT |
| | c.892 − 2A > G | | | AAACCAGGCAAAGATGGAGAA′] |
| 4090 | NM_000495.4(COL4A5): | 1287 | COL4A5 | [′TTGCTATCCTTTCTTTATCTTACTCRGGTGA |
| | c.1340 − 2A > G | | | TGAGATATGTGAACCAGGCC′] |
| 4091 | NM_000495.4(COL4A5): | 1287 | COL4A5 | [′TTCTTTGAACGTTTTCCTTTCAATARCTGCT |
| | c.2042 − 18A > G | | | GTTTCTCCATAGGTGACCCT′] |
| 4092 | NM_000495.4(COL4A5): | 1287 | COL4A5 | [′GTTAAAAAATGACTTATCATTTTACRGGCT |
| | c.2147 − 2A > G | | | TTCCTGGAATTCCAGGACCTC′] |
| 4093 | NM_000495.4(COL4A5): | 1287 | COL4A5 | [′GCTTAGATGGGCTCCCTGGACCAAARGGT |
| | c.2394A > G (p.Lys798=) | | | ATGGAGGCTGTCACTGCATCTC′] |
| 4094 | NM_000495.4(COL4A5): | 1287 | COL4A5 | [′CAGATACATCTTTTAAAACTGCTTCRGTAC |
| | c.2510 − 33A > G | | | TTATTAATATTGATATTGTAT′] |
| 4095 | NM_000495.4(COL4A5): | 1287 | COL4A5 | [′ATTCTTCAAAGGTACCAAAGGTGAARTGG |
| | Gc.2692A > (p.Met898Val) | | | GTATGATGGGACCTCCAGGCCC′] |
| 4096 | NM_000495.4(COL4A5): | 1287 | COL4A5 | [′AGGACCTTTGGGAATTCCTGGCAGGRGTG |
| | c.2746A > G (p.Ser916Gly) | | | GTGTACCTGGTCTTAAAGGTAA′] |
| 4097 | NM_000495.4(COL4A5): | 1287 | COL4A5 | [′ATATTATATATCACATATTTTCAACRGGGC |
| | 2c.3107 − A > G | | | CTCAGGGTGTGGAAGGGCCTC′] |
| 4098 | NM_000495.4(COL4A5): | 1287 | COL4A5 | [′AACTGGGTGTAACCTGCTGTACTCARTTTT |
| | c.3455 − 9A > G | | | TTAGGTGGTGGAGGTCATCCT′] |
| 4099 | NM_000495.4(COL4A5): | 1287 | COL4A5 | [′TCTTCTAATTATACTTTACTTTCATRGGCCA |
| | c.3605 − 2A > G | | | AAAGGGTGATGGAGGATTAC′] |
| 4100 | NM_000495.4(COL4A5): | 1287 | COL4A5 | [′GTAACATTAATGATTTTATTTATTCRGGGT |
| | c.3925 − 2A > G | | | AATCCTGGCCGGCCGGGTCTC′] |
| 4101 | NM_000495.4(COL4A5): | 1287 | COL4A5 | [′ATAAAACTGTATGTACCTTCTGTGCDGGCA |
| | c.3998 − 2A > G | | | TGAAAGGACCCAGTGGAGTAC′] |
| 4102 | NM_000495.4(COL4A5): | 1287 | COL4A5 | [′GGATGGGATTCTCTGTGGATTGGTTRTTCC |
| | Gc.4790A > (p.Tyr1597Cys) | | | TTCATGATGGTATTTTACACT′] |
| 4103 | NM_000495.4(COL4A5): | 1287 | COL4A5 | [′CTGATTGTCTTATTTCTTATTTCCCRGTAAA |
| | c.4977 − 2A > G | | | CCTCAGTCAGAAACGCTGAA′] |
| 4104 | NM_005359.5(SMAD4): | 4089 | SMAD4 | [′TTTCATTTGTTTTCCCCTTTAAACARTTAAG |
| | c.425 − 6A > G | | | ATCTCTCAGGATTAACACTG′] |
| 4105 | NM_005359.5(SMAD4): c.989A > G | 4089 | SMAD4 | [′TATTGGTGTTCCATTGCTTACTTTGRAATG |
| | (p.Glu330Gly) | | | GATGTTCAGGTAGGAGAGACA′] |
| 4106 | NM_020630.4(RET): c.1996A > G | 5979 | RET | [′CCACTGCTACCACAAGTTTGCCCACVAGCC |
| | (p.Lys666Glu) | | | ACCCATCTCCTCAGCTGAGAT′] |
| 4107 | NM_020630.4(RET): c.2342A > G | 5979 | RET | [′CTGTCAGAGTTCAACGTCCTGAAGCRGGTC |
| | (p.Gln781Arg) | | | AACCACCCACATGTCATCAAA′] |
| 4108 | NM_000060.3(BTD): c.194A > G | 686 | BTD | [′TATTATGTGGCTGCCGTGTATGAGCRTCCA |
| | (p.His65Arg) | | | TCCATCCTGAGTCTGAACCCT′] |
| 4109 | NM_000060.3(BTD): c.278A > G | 686 | BTD | [′CTCATGAACCAGAACCTTGACATCTRTGAA |
| | (p.Tyr93Cys) | | | CAGCAAGTGATGACTGCAGCC′] |
| 4110 | NM_000060.3(BTD): c.356A > G | 686 | BTD | [′CCAGAAGATGGCATTCATGGATTCARCTTT |
| | (p.Asn119Ser) | | | ACAAGAACATCCATTTATCCA′] |
| 4111 | NM_000060.3(BTD): c.364A > G | 686 | BTD | [′TGGCATTCATGGATTCAACTTTACARGAAC |
| | (p.Arg122Gly) | | | ATCCATTTATCCATTTTTGGA′] |
| 4112 | NM_000060.3(BTD): c.515A > G | 686 | BTD | [′AGGGGAGATATGTTCTTGGTGGCCARTCTT |
| | (p.Asn172Ser) | | | GGGACAAAGGAGCCTTGTCAT′] |
| 4113 | NM_000060.3(BTD): c.583A > G | 686 | BTD | [′CCCAAAAGATGGGAGATACCAGTTCRACA |
| | (p.Asn195Asp) | | | CAAATGTCGTGTTCAGCAATAA′] |
| 4114 | NM_000060.3(BTD): c.584A > G | 686 | BTD | [′CCAAAAGATGGGAGATACCAGTTCARCAC |
| | (p.Asn195Ser) | | | AAATGTCGTGTTCAGCAATAAT′] |
| 4115 | NM_000060.3(BTD): c.641A > G | 686 | BTD | [′CTTGTTGACCGCTACCGTAAACACARCCTC |
| | (p.Asn214Ser) | | | TACTTTGAGGCAGCATTCGAT′] |
| 4116 | NM_000060.3(BTD): c.880A > G | 686 | BTD | [′GAAAGCTTTTGCTGTTGCCTTTGGCRTCAA |
| | (p.Ile294Val) | | | CGTTCTGGCAGCTAATGTCCA′] |
| 4117 | NM_000060.3(BTD): c.1205A > G | 686 | BTD | [′TTTCACTCTGAGATGATGTATGACARTTTC |
| | (p.Asn402Ser) | | | ACCCTGGTCCCTGTCTGGGGA′] |
| 4118 | NM_000060.3(BTD): c.1313A > G | 686 | BTD | [′AGGCCCACCTTATCCAAAGAGCTGTRTGCC |
| | (p.Tyr438Cys) | | | CTGGGGGTCTTTGATGGGCTT′] |
| 4119 | NM_000060.3(BTD): c.1619A > G | 686 | BTD | [′ACGGCGGCTCTCTATGGGCGCTTGTRTGAG |
| | (p.Tyr540Cys) | | | AGGGACTAGGAAAAGTGTGTG′] |
| 4120 | NM_000155.3(GALT): c.1A > G | 2592 | GALT | [′TTCCAGCGGATCCCCCGGTGGCCTCRTGTC |
| | (p.Met1Val) | | | GCGCAGTGGAACCGATCCTCA′] |
| 4121 | NM_000155.3(GALT): c.67A > G | 2592 | GALT | [′GTCAGAGGCGGACGCCGCAGCAGCARCCT |
| | (p.Thr23Ala) | | | TCCGGGCAAACGGTAACTGCAC′] |
| 4122 | NM_000155.3(GALT): | 2592 | GALT | [′GTGCTTCTAGCCTATCCTTGTCGGTRGGTG |
| | c.253 − 2A > G | | | AATCCCCAGTACGATAGCACC′] |
| 4123 | NM_000155.3(GALT): c.290A > G | 2592 | GALT | [′TACGATAGCACCTTCCTGTTTGACARCGAC |
| | (p.Asn97Ser) | | | TTCCCAGCTCTGCAGCCTGAT′] |
| 4124 | NM_000155.3(GALT): c.308A > G | 2592 | GALT | [′TTTGACAACGACTTCCCAGCTCTGCRGCCT |
| | (p.Gln103Arg) | | | GATGCCCCCAGTCCAGGTAAC′] |
| 4125 | NM_000155.3(GALT): c.379A > G | 2592 | GALT | [′ATCTTTTCTCCCGTCACCACCCAGTRAGGT |
| | (p.Lys127Glu) | | | CATGTGCTTCCACCCCTGGTC′] |
| 4126 | NM_000155.3(GALT): c.424A > G | 2592 | GALT | [′CTGGTCGGATGTAACGCTGCCACTCRTGTC |
| | (p.Met142Val) | | | GGTCCCTGAGATCCGGGCTGT′] |
| 4127 | NM_000155.3(GALT): | 2592 | GALT | [′TTCTTCTCTGCTTTTGCCCCTTGACRGGTAT |
| | c.565 − 2A > G | | | GGGCCAGCAGTTTCCTGCCA′] |
| 4128 | NM_000155.3(GALT): c.574A > G | 2592 | GALT | [′TTTTGCCCCTTGACAGGTATGGGCCRGCAG |
| | (p.Ser192Gly) | | | TTTCCTGCCAGATATTGCCCA′] |
| 4129 | NM_000155.3(GALT): c.626A > G | 2592 | GALT | [′CGTGAGGAGCGATCTCAGCAGGCCTVTAA |
| | (p.Tyr209Cys) | | | GAGTCAGCATGGAGAGCCCCTG′] |
| 4130 | NM_000155.3(GALT): c.752A > G | 2592 | GALT | [′GTCCCCTTCTGGGCAACATGGCCCTVCCAG |
| | (p.Tyr251Cys) | | | ACACTGCTGCTGCCCGTCGGC′] |
| 4131 | NM_000155.3(GALT): c.812A > G | 2592 | GALT | [′CGGCTACCTGAGCTGACCCCTGCTGRGCGT |
| | (p.Glu271Gly) | | | GATGGTCAGTCTCCCAAGTAG′] |
| 4132 | NM_000155.3(GALT): | 2592 | GALT | [′AGGCTGAGAGTCAGGCTCTGATTCCRGAT |
| | c.821 − 2A > G | | | CTAGCCTCCATCATGAAGAAGC′] |
| 4133 | NM_000155.3(GALT): c.854A > G | 2592 | GALT | [′TCCATCATGAAGAAGCTCTTGACCARGTAT |
| | (p.Lys285Arg) | | | GACAACCTCTTTGAGACGTCC′] |
| 4134 | NM_000155.3(GALT): c.968A > G | 2592 | GALT | [′CATTGGCAGCTGCACGCTCATTACTRCCCT |
| | (p.Tyr323Cys) | | | CCGCTCCTGCGCTCTGCCACT′] |
| 4135 | NM_000155.3(GALT): c.1001A > G | 2592 | GALT | [′CTCCTGCGCTCTGCCACTGTCCGGARATTC |
| | (p.Lys334Arg) | | | ATGGTTGGCTACGAAATGCTT′] |
| 4136 | NM_000155.3(GALT): c.1048A > G | 2592 | GALT | [′GCTTGCTCAGGCTCAGAGGGACCTCRCCCC |
| | (p.Thr350Ala) | | | TGAGCAGGTCAGGACTCAGAA′] |
| 4137 | NM_000155.3(GALT): c.1132A > G | 2592 | GALT | [′GCAGAAGGACAGGGAGACAGCAACCRTCG |
| | (p.Ile378Val) | | | CCTGACCACGCCGACCACAGGG′] |
| 4138 | NM_000553.4(WRN): c.403A > G | 7486 | WRN | [′GTTGCTTGAAAATAAAGCAGTTAAARAGG |
| | (p.Lys135Glu) | | | CAGGTGTAGGAATTGAAGGAGA′] |
| 4139 | NM_000433.3(NCF2): c.481A > G | 4688 | NCF2 | [′CTTACCCAGACACACTCCATCGCCTYGTCG |
| | (p.Lys161Glu) | | | ATTTTGGAATGTCTGGGCTCA′] |
| 4140 | NM_198056.2(SCN5A): | 6331 | SCN5A | [′ACAGCGGGGGAGAGCGAGAGCCACCRCAC |
| | c.1673A > G (p.His558Arg) | | | ATCACTGCTGGTGCCCTGGCCC′] |
| 4141 | NM_000074.2(CD40LG): | 959 | CD40LG | [′CAAATTGCGGCACATGTCATAAGTGRGGC |
| | c.386A > G (p.Glu129Gly) | | | CAGCAGTAAAACAACATCTGGT′] |
| 4142 | NM_002863.4(PYGL): c.1016A > G | 5836 | PYGL | [′CCCACCCAGGTGGCCATCCAGCTGARTGA |
| | (p.Asn339Ser) | | | CACTCACCCTGCACTCGCGATC′] |
| 4143 | NM_000142.4(FGFR3): | 2261 | FGFR3 | [′CCCCTTGGGGAGGGCTGCTTCGGCCRGGT |
| | c.1454A > G (p.Gln485Arg) | | | GGTCATGGCGGAGGCCATCGGC′] |
| 4144 | NM_001101.3(ACTB): c.34A > G | 60 | ACTB | [′TGATATCGCCGCGCTCGTCGTCGACVACG |
| | (p.Asn12Asp) | | | GCTCCGGCATGTGCAAGGCCGG′] |
| 4145 | NM_001202.3(BMP4): c.362A > G | 652 | BMP4 | [′TGGGGGAAGAGACTGACCTTCGTGGYGGA |
| | (p.His121Arg) | | | AGCTCCTCACGGTGTTGGCCCG′] |
| 4146 | NM_000094.3(COL7A1): | 1294 | COL7A1 | [′CAGCTGGCCCGACCTGGTGTCCCCARGGT |
| | c.425A > G (p.Lys142Arg) | | | GATCCCTACCCCTACCATGCCT′] |
| | NM_001130823.1(DNMT1): | 1786 | DNMT1 | [] |
| | c.1532A > G (p.Tyr511Cys) | | | |
| 4147 | NM_000138.4(FBN1): c.5096A > G | 2200 | FBN1 | [′AGAAGAAGTTTGTGCTACAGAAACTRCTA |
| | (p.Tyr1699Cys) | | | TGCTGACAACCAGACCTGTGAT′] |
| 4148 | NM_000138.4(FBN1): c.5087A > G | 2200 | FBN1 | [′CTAGATATGAGAAGAAGTTTGTGCTRCAG |
| | (p.Tyr1696Cys) | | | AAACTACTATGCTGACAACCAG′] |
| 4149 | NM_000138.4(FBN1): c.5099A > G | 2200 | FBN1 | [′AGAAGTTTGTGCTACAGAAACTACTRTGCT |
| | (p.Tyr1700Cys) | | | GACAACCAGACCTGTGATGGA′] |
| 4150 | NM_001244710.1(GFPT1): | 2673 | GFPT1 | [′TTACTTAAACTACCATGTTCCTCGARCGAG |
| | c.43A > G (p.Thr15Ala) | | | ACGAGAAATCCTGGAGACCCT′] |
| 4151 | NM_002292.3(LAMB2): c.440A > G | 3913 | LAMB2 | [′CTGGAGGCTGAGTTTCATTTCACACRCCTC |
| | (p.His 147Arg) | | | ATTATGACCTTCAAGGTGCCT′] |
| 4152 | NM_005211.3(CSF1R): | 1436 | CSF1R | [′GACTTAAGGGACCTGTGTGCGTGGCRGGT |
| | c.1754 − 2A > G | | | AAGACCCTCGGAGCTGGAGCCT′] |
| 4153 | NM_005247.2(FGF3): c.146A > G | 2248 | FGF3 | [′GGGGCGCCCCGGCGCCGCAAGCTCTRCTG |
| | (p.Tyr49Cys) | | | CGCCACGAAGTACCACCTCCAG′] |
| 4154 | NM_005247.2(FGF3): c.317A > G | 2248 | FGF3 | [′GCCATGAACAAGAGGGGACGACTCTRTGC |
| | (p.Tyr106Cys) | | | TTCGGTGAGTCCAGGCTGTCAC′] |
| 4155 | NM_005188.3(CBL): c.1112A > G | 867 | CBL | [′TAATCAAAGGAACAATATGAATTATRCTG |
| | (p.Tyr371Cys) | | | TGAGATGGGCTCCACATTCCAA′] |
| 4156 | NM_000313.3(PROS1): c.701A > G | 5627 | PROS1 | [′TGTGAATGCCCCGAAGGCTACAGATRTAA |
| | (p.Tyr234Cys) | | | TCTCAAATCAAAGTCTTGTGAA′] |
| 4157 | NM_000329.2(RPE65): | 6121 | RPE65 | [′TACCAGAAGTATTGTGGGAAACCTTRCAC |
| | c.1292A > G (p.Tyr431Cys) | | | ATATGCGTATGGACTTGGCTTG′] |
| 4158 | NM_001040142.1(SCN2A): | 6326 | SCN2A | [′TGAATCTTTTCATTGGTGTCATCATRGATA |
| | c.4419A > G (p.Ile 1473Met) | | | ACTTCAACCAACAGAAAAAGA′] |
| 4159 | NM_001040142.1(SCN2A): | 6326 | SCN2A | [′GTCAGTGAAGAAGCTTTCTGATGTCRTGAT |
| | c.754A > G (p.Met252Val) | | | CTTGACTGTGTTCTGTCTAAG′] |
| 4160 | NM_004612.3(TGFBR1): | 7046 | TGFBR1 | [′TTCTGCCACCTCTGTACAAAAGACARTTTT |
| | c.134A > G (p.Asn45Ser) | | | ACTTGTGTGACAGATGGGCTC′] |
| 4161 | NM_003688.3(CASK): c.2168A > G | 8573 | CASK | [′TTTGATCAATTAGATCTTGTCACATRTGAA |
| | (p.Tyr723Cys) | | | GAAGTAGTAAAACTGCCAGCA′] |
| 4162 | NM_015884.3(MBTPS2): | 51360 | MBTPS2 | [′GGTGGCAGTGTACTTTTGGCTGCCARTGTG |
| | c.1523A > G (p.Asn508Ser) | | | ACCCTGGGACTCTGGATGGTT′] |
| 4163 | m.10450A > G | 4573 | MT-TR | [′ACGAATGATTTCGACTCATTAAATTRTGAT |
| | | | | AATCATATTTACCAAATGCCC′] |
| 4164 | m.5816A > G | 4511 | MT-TC | [′GAATTTGCAATTCAATATGAAAATCRCCTC |
| | | | | GGAGCTGGTAAAAAGAGGCCT′] |
| 4165 | m.608A > G | 4558 | MT-TF | [′GTAGCTTACCTCCTCAAAGCAATACRCTGA |
| | | | | AAATGTTTAGACGGGCTCACA′] |
| 4166 | NM_172337.2(OTX2): c.674A > G | 5015 | OTX2 | [′CTGATTGAGATGGCTGGTGACTGCAYTGG |
| | (p.Asn225Ser) | | | TACCCATGGGACTGAGTGTGGC′] |
| 4167 | NM_001376.4(DYNC1H1): | 1778 | DYNC1H1 | [′CTCCTGACTCTGGATATCTTGAAACRTGGC |
| | c.917A > G (p.His306Arg) | | | AAGCGCTTCCATGCCACCGTC′] |
| 4168 | NM_001376.4(DYNC1H1): | 1778 | DYNC1H1 | [′GAAGCGGGTGGAAGATGTCCTTGGCRAGG |
| | c.2011A > G (p.Lys671Glu) | | | GCTGGGAGAATCACGTGGAGGG′] |
| 4169 | NM_001376.4(DYNC1H1): | 1778 | DYNC1H1 | [′CTAAGAATAACCAATCAGGTAATCTRCTTG |
| | c.2909A > G (p.Tyr970Cys) | | | AATCCACCAATTGAAGAGTGC′] |
| 4170 | NM_004380.2(CREBBP): | 1387 | CREBBP | [′ACTGTAGGGGTGCTCTGGGTTTGGGHAGC |
| | c.2728A > G (p.Thr910Ala) | | | ACTGGGCACTGAGCCAGGAGTC′] |
| 4171 | NM_000459.4(TEK): c.2690A > G | 7010 | TEK | [′ATGCTCTCTTCCTTCCCTCCAGGCTVCTTGT |
| | (p.Tyr897Cys) | | | ACCTGGCCATTGAGTACGCG′] |
| 4172 | NM_001354.5(AKR1C2): | 1646 | AKR1C2 | [′AGATGGCAGTGTGAAGAGAGAAGACRTAT |
| | c.235A > G (p.Ile79Val) | | | TCTACACTTCAAAGGTACTGTG′] |
| 4173 | NM_007315.3(STAT1): c.604A > G | 6772 | STAT1 | [′ACAAGAACAGCTGTTACTCAAGAAGRTGT |
| | (p.Met202Val) | | | ATTTAATGCTTGACAATAAGAG′] |
| 4174 | NM_007315.3(STAT1): c.494A > G | 6772 | STAT1 | [′GAGCATGAAATCAAGAGCCTGGAAGRTTT |
| | (p.Asp165Gly) | | | ACAAGATGAATATGACTTCAAA′] |
| 4175 | NM_007315.3(STAT1): c.862A > G | 6772 | STAT1 | [′GTTGGAGGAATTGGAACAGAAATACRCCT |
| | (p.Thr288Ala) | | | ACGAACATGACCCTATCACAAA′] |
| 4176 | NM_002052.4(GATA4): c.928A > G | 2626 | GATA4 | [′CCTCCAGGTCCCCAGGCCTCTTGCARTGCG |
| | (p.Met310Val) | | | GAAAGAGGGGATCCAAACCAG′] |
| 4177 | NM_014191.3(SCN8A): | 6334 | SCN8A | [′CATGTACATTGCCATCATCCTGGAGRACTT |
| | c.5302A > G (p.Asn1768Asp) | | | CAGTGTAGCCACAGAGGAAAG′] |
| 4178 | NM_000209.3(PDX1): c.533A > G | 3651 | PDX1 | [′TACATCTCACGGCCGCGCCGGGTGGRGCT |
| | (p.Glu178Gly) | | | GGCTGTCATGTTGAACTTGACC′] |
| 4179 | NM_000890.3(KCNJ5): c.472A > G | 3762 | KCNJ5 | [′CATTGGGTATGGCTTCCGAGTCATCRCAGA |
| | (p.Thr158Ala) | | | GAAGTGTCCAGAGGGGATTAT′] |
| 4180 | NM_000256.3(MYBPC3): | 4607 | MYBPC3 | [′ACGGTCGAGGGGGCAGAGAAGGAAGRTG |
| | c.2234A > G (p.Asp745Gly) | | | AGGGCGTCTACACGGTCACAGTG′] |
| 4181 | NM_005359.5(SMAD4): | 4089 | SMAD4 | [′TGTTGATGACCTTCGTCGCTTATGCRTACT |
| | c.1498A > G (p.Ile500Val) | | | CAGGATGAGTTTTGTGAAAGG′] |
| 4182 | NM_005359.5(SMAD4): | 4089 | SMAD4 | [′TTGATGACCTTCGTCGCTTATGCATRCTCA |
| | c.1500A > G (p.Ile500Met) | | | GGATGAGTTTTGTGAAAGGCT′] |
| 4183 | NM_001184.3(ATR): c.6431A > G | 545 | ATR | [′TATCAATTTTTGACTGCTTTTTCACRATTGA |
| | (p.Gln2144Arg) | | | TCTCTCGAATTTGTCATTCT′] |
| 4184 | NM_153427.2(PITX2): c.262A > G | 5308 | PITX2 | [′CCCCAACCGCCCCCAGGTTTGGTTCRAGAA |
| | (p.Lys88Glu) | | | TCGTCGGGCCAAATGGAGAAA′] |
| 4185 | NM_005257.5(GATA6): | 2627 | GATA6 | [′CTGTGCCAACTGTCACACCACAACTRCCAC |
| | c.1354A > G (p.Thr452Ala) | | | CTTATGGCGCAGAAACGCCGA′] |
| 4186 | NM_005257.5(GATA6): | 2627 | GATA6 | [′AAACGCCGAGGGTGAACCCGTGTGCVATG |
| | c.1396A > G (p.Asn466Asp) | | | CTTGTGGACTCTACATGAAACT′] |
| 4187 | NM_000414.3(HSD17B4): | 3295 | HSD17B4 | [′CTTGTGGAAGCCCTGAAGCCAGAGTRTGT |
| | c.650A > G (p.Tyr217Cys) | | | GGCACCTCTTGTCCTTTGGCTT′] |
| 4188 | NM_004153.3(ORC1): c.380A > G | 4998 | ORC1 | [′GCCTGTGACAGCAACATTAATGCGGRGAC |
| | (p.Glu127Gly) | | | CATCATTGGCCTTGTTCGGGTA′] |
| 4189 | NM_002552.4(ORC4): c.521A > G | 5000 | ORC4 | [′CATCATAAAAACCAAACACTTCTCTRTAAT |
| | (p.Tyr174Cys) | | | CTTTTTGACATTTCTCAGTCT′] |
| 4190 | NM_004656.3(BAP1): | 8314 | BAP1 | [′GCTCCACTAGGTTGGCCAGCATGCCYGCG |
| | c.2057 − 2A > G | | | AAGAGGTAGAGACCCTTGAGCA′] |
| 4191 | NM_004656.3(BAP1): | 8314 | BAP1 | [′TCAGGGAGGTGGCGTGGCTCGGGCCYGGG |
| | c.438 − 2A > G | | | GAAAAACAGAGTCAGGGCCCAA′] |
| | NM_003590.4(CUL3): c.1238A > G | 8452 | CUL3 | [] |
| | (p.Asp413Gly) | | | |
| 4192 | NM_004813.2(PEX16): c.992A > G | 9409 | PEX16 | [′TACTTGCCCACCTGGCAGAAAATCTRCTTC |
| | (p.Tyr331Cys) | | | TACAGTTGGGGCTGACAGACC′] |
| 4193 | NM_004544.3(NDUFA10): c.1A > G | 4705 | NDUFA10 | [′TTGATCCTGAGCTGACCGGGTAGCCRTGGC |
| | (p.Met1Val) | | | CTTGCGGCTCCTGAAGCTGGC′] |
| 4194 | NM_004544.3(NDUFA10): | 4705 | NDUFA10 | [′TGGTTGTACAGCAGTCGCCTGCTGCRGTAC |
| | c.425A > G (p.Gln142Arg) | | | TCAGATGCCTTGGAGCACTTG′] |
| 4195 | NM_006796.2(AFG3L2): | 10939 | AFG3L2 | [′TATTTTTCAGATTGTTCAGTTTGGCDTGAA |
| | c.1996A > G (p.Met666Val) | | | TGAAAAGGTTGGGCAAATCTC′] |
| 4196 | NM_006796.2(AFG3L2): | 10939 | AFG3L2 | [′TATTTACCAAAAGAACAATACCTCTRTACC |
| | c.1847A > G (p.Tyr616Cys) | | | AAAGAGCAGCTCTTGGATAGG′] |
| 4197 | NM_001199397.1(NEK1): | 4750 | NEK1 | [′CAAAATTCTTTGTATCTTTTCATCTRGCTA |
| | c.869 − 2A > G | | | AAAGACCAGCTTCAGGACAAA′] |
| 4198 | NM_006587.3(CORIN): c.949A > G | 10699 | CORIN | [′GAATCTGTTTCACTGTCACACAGGCRAGTG |
| | (p.Lys317Glu) | | | CCTTAATTACAGCCTTGTGTG′] |
| 4199 | NM_006587.3(CORIN): | 10699 | CORIN | [′CATGAATTTGCCCTACAACAGTACARGTTA |
| | c.1414A > G (p.Ser472Gly) | | | TCCAAATTATTTTGGCCACAG′] |
| 4200 | NM_015560.2(OPA1): c.1294A > G | 4976 | OPA1 | [′AGCTTACATGCAGAATCCTAATGCCRTCAT |
| | (p.Ile432Val) | | | ACTGTGTATTCAAGGTAAATC′] |
| 4201 | NM_021625.4(TRPV4): | 59341 | TRPV4 | [′CGTGGGCTGAAGCTGACGGGGACCTRTAG |
| | c.1805A > G (p.Tyr602Cys) | | | CATCATGATCCAGAAGGTACGG′] |
| 4202 | NM_021625.4(TRPV4): c.590A > G | 59341 | TRPV4 | [′TCTACGGGGAAGACCTGCCTGCCCARGGC |
| | (p.Lys197Arg) | | | CTTGCTGAACCTGAGCAATGGC′] |
| 4203 | NM_021625.4(TRPV4): c.826A > G | 59341 | TRPV4 | [′GGCCCGTGGGCGCTTCTTCCAGCCCRAGG |
| | (p.Lys276Glu) | | | ATGAGGGGGGCTACTTCTACTT′] |
| 4204 | NM_024022.2(TMPRSS3): | 64699 | TMPRSS3 | [′GTCTCGGATTGCAAAGACGGGGAGGREGA |
| | c.308A > G (p.Asp103Gly) | | | GTACCGCTGTGGTAAGGTCATG′] |
| 4205 | NM_016599.4(MYOZ2): c.738A > G | 51778 | MYOZ2 | [′GATGGATATCTGAGAATATTCCTATRGTGA |
| | (p.Ile246Met) | | | TAACAACCGAACCTACAGATG′] |
| | NM_017415.2(KLHL3): | 26249 | KLHL3 | [] |
| | c.1670A > G (p.Tyr557Cys) | | | |
| 4206 | NM_019109.4(ALG1): c.1129A > G | 56052 | ALG1 | [′GTCCTCCAGTGGCCTGGACCTGCCCRTGAA |
| | (p.Met377Val) | | | GGTGGTGGACATGTTCGGGTG′] |
| 4207 | NM_031885.3(BBS2): | 583 | BBS2 | [′GCTAATGGTTTGGGGTTTTATTTTCRGGTT |
| | c.472 − 2A > G | | | ACTGGAGACAATGTTAATTCC′] |
| 4208 | NM_006886.3(ATP5E): c.35A > G | −1 | — | [′TACCTTCTCTCATTTTCTCCCAGCTRCATCC |
| | (p.Tyr12Cys) | | | GATACTCCCAGATCTGTGCA′] |
| 4209 | NM_022445.3(TPK1): c.656A > G | 27010 | TPK1 | [′CACAACACCAGACCCGTCGTAGGTAYTGG |
| | (p.Asn219Ser) | | | AAGTACTGACCAATGTTCCAAA′] |
| 4210 | NM_000017.3(ACADS): | 35 | ACADS | [′CTCTGACTGTACCCCCATGTTTAGGRGGCA |
| | c.1031A > G (p.Glu344Gly) | | | GCCATGGCCAAGCTGGCCGCC′] |
| 4211 | NM_016013.3(NDUFAF1): | 51103 | NDUFAF1 | [′GGGGGACCCTACTGGCAGGAGGTCARGGT |
| | c.758A > G (p.Lys253Arg) | | | AACAGCATAAATCTTCATTGTT′] |
| 4212 | NM_032580.3(HES7): c.172A > G | 84667 | HES7 | [′GAACCCGAAGCTGGAGAAAGCGGAGRTAT |
| | (p.Ile58Val) | | | TGGAGTTCGCCGTGGGCTACTT′] |
| 4213 | NM_024887.3(DHDDS): c.124A > G | 79947 | DHDDS | [′GGACGGGAACCGTCGCTATGCCAAGRAGT |
| | (p.Lys42Glu) | | | GCCAGGTGGAGCGGCAGGAAGG′] |
| 4214 | NM_024700.3(SNIP1): | 79753 | SNIP1 | [′CTCAAATTTGGATTCAGTAGCAGAGRATA |
| | c.1097A > G (p.Glu366Gly) | | | CGTCTTGCTCCATGAGTCGTCG′] |
| 4215 | NM_206933.2(USH2A): | 7399 | USH2A | [′AATTGAACACCTCTCCTTTCCCAAGRTAAG |
| | 2c.7595 − 144A > G | | | AGATCATCTTTAAGAAAAGGC′] |
| 4216 | NM_016952.4(CDON): c.2368A > G | 50937 | CDON | [′GTTTTTGTTTTCCCTCAAAGGTTCARCATA |
| | (p.Thr790Ala) | | | CAAATTTAGGGTCATTGCCAT′] |
| 4217 | NM_020435.3(GJC2): | 57165 | GJC2 | [′AGACCCTGAGGCCGAGGGGGGAACARTGG |
| | c.−167A > G | | | GGCCCTTGAGGGCCCCTCCTCC′] |
| 4218 | NM_024549.5(TCTN1): | 79600 | TCTN1 | [′TGGATCCTACCCCTCTTTTTTCTGCRGTTGC |
| | c.221 − 2A > G | | | TGTTCTCTGTGTCTGTGACT′] |
| 4219 | NM_031427.3(DNAL1): c.449A > G | 83544 | DNAL1 | [′CTCGAAGACCTGGTGTTTGTAGGCARTCCC |
| | (p.Asn150Ser) | | | TTGGAAGAGAAACATTCTGCT′] |
| 4220 | NM_145046.4(CALR3): c.245A > G | 125972 | CALR3 | [′AGTTTTCCCTTTATTGCTGAACGGTYTGAA |
| | (p.Lys82Arg) | | | GCGTGCAGAGATGGCATAGAA′] |
| 4221 | NM_020320.3(RARS2): | 57038 | RARS2 | [′AATGGACAAGTATAATTTTGATACARTGAT |
| | c.1024A > G p.Met342Val) | | | ATATGTGGTAAGTAATCAGAA′] |
| 4222 | NM_020320.3(RARS2): c.35A > G | 57038 | RARS2 | [′CTCTGCGCGCTCCGGGATCCATACCYGGC |
| | (p.Gln12Arg) | | | AAGCAATAGCGCGGCGAAAGCC′] |
| 4223 | NM_001017361.2(KHDC3L): | 154288 | KHDC3L | [′TGTCTCCTGCAGGACCGGCCGCAGCRTGG |
| | c.1A> G (p.Met1Val) | | | ACGCTCCCAGGCGGTTTCCGAC′] |
| 4224 | NM_024753.4(TTC21B): | 79809 | TTC21B | [′TAATCGTGCCAGTTCCAACATAATCYGTAG |
| | c.2758 − 2A > G | | | AGCAAAGGGCTAGATTCATCA′] |
| 4225 | NM_001145901.1(SARS2): | 54938 | SARS2 | [′TTCGTCCTTGACCGCAGGGTCCTGGRTATG |
| | c.1175A > G (p.Asp392Gly) | | | CCCACCCAAGAACTGGGCCTC′] |
| 4226 | NM_000552.3(VWF): c.3437A > G | 7450 | VWF | [′AACGGGTATGAGTGTGAGTGGCGCTRTAA |
| | (p.Tyr1146Cys) | | | CAGCTGTGCACCTGCCTGTCAA′] |
| 4227 | NM_014985.3(CEP152): | 22995 | CEP152 | [′ACCTTACCTATCCACAGCTTCTTGTYTGTC |
| | c.2000A > G (p.Lys667Arg) | | | ATGGTCAAAATCTTGTACCAT′] |
| 4228 | NM_024809.4(TCTN2): | 79867 | TCTN2 | [′GCTGAGAAATGTCTTACTCTCTTGCRGGGA |
| | c.1506 − 2A > G | | | GAATGCTGTTGAAAGACTTGA′] |
| 4229 | NM_198994.2(TGM6): c.980A > G | 343641 | TGM6 | [′CGGACCCTGGAGGACCTGACAGAAGRCAG |
| | (p.Asp327Gly) | | | CATGTGGTGGGTCCTGCCCCCA′] |
| 4230 | NM_052873.2(IFT43): c.1A > G | 112752 | IFT43 | [′GAAGTGACGTCAGGCGGCCGCGGAGRTGG |
| | (p.Met1Val) | | | AGGATTTGCTCGACTTGGACGA′] |
| 4231 | NM_201269.2(ZNF644): | 84146 | ZNF644 | [′AACATTTGGATCAACCTCACAATCARGTA |
| | c.2014A > G (p.Ser672Gly) | | | GTTTTTCAAAAATTCATAAGCG′] |
| 4232 | NM_201269.2(ZNF644): | 84146 | ZNF644 | [′GTAGTAAAAGGACACATCTTACATAYGTA |
| | c.1759A > G (p.Ile587Val) | | | GGTAGCTGATTTTTTGGATGAT′] |
| 4233 | NM_018699.3(PRDM5): c.320A > G | 11107 | PRDM5 | [′TTTCAGGAAGGAGAAAACATTTTCTRTTTG |
| | (p.Tyr107Cys) | | | GCAGTTGAAGATATAGAAACA′] |
| 4234 | NM_001198799.2(ASCC1): | 51008 | ASCC1 | [′CTATAGTTCTCTGGGGGACTTACCAYTGGG |
| | c.953A > G (p.Asn318Ser) | | | GTCTTTCCTGAATAGTGTATT′] |
| 4235 | NM_007055.3(POLR3A): | 11128 | POLR3A | [′ACCAACTGAGTTTTTCTTCCACACARTGGC |
| | c.2554A > G (p.Met852Val) | | | CGGCCGGGAAGGTCTAGTCGA′] |
| 4236 | NM_001256047.1(C19orf12): | 83636 | C19orf12 | [′TACTGGATCTCGGCCCGCAGCTCCTYGGTG |
| | c.391A > G (p.Lys131Glu) | | | ACGTAGTTCACCAGCATGGCC′] |
| 4237 | NM_016464.4(TMEM138): | 51524 | TMEM138 | [′TACTTTGCCCTCAGCATCTCCCTTCRTGTCT |
| | c.287A > G (p.His96Arg) | | | GGGTCATGGTAAGAGTGGCA′] |
| 4238 | NM_016464.4(TMEM138): | 51524 | TMEM138 | [′TTCCTCCCCACAGCAGCAGTGTTGTRCTGC |
| | c.389A > G (p.Tyr130Cys) | | | TACTTCTATAAACGGACAGCC′] |
| 4239 | NM_177965.3(C8orf37): | 157657 | C8orf37 | [′AAAGGAACACGGGCATATGCCTGCCRGTG |
| | c.545A > G (p.Gln182Arg) | | | TAGCTGGAGAACTATTGAAGAA′] |
| 4240 | NM_001004334.3(GPR179): | 440435 | GPR179 | [′CCCAAGTGGCCGCAGGCAGATGGATRTGT |
| | c.659A > G (p.Tyr220Cys) | | | GGGGGACACGCAGCAGGTGAGG′] |
| 4241 | NM_004963.3(GUCY2C): | 2984 | GUCY2C | [′AGCAGTGAGACATACTTTCTTGGTGYCCAC |
| | c.1160A > G (p.Asp387Gly) | | | AGAGGTATACAGAAGCACCAT′] |
| 4242 | NM_024110.4(CARD14): | 79092 | CARD14 | [′AGCCTGCAGGAGGAGCTGAACCAGGRAAA |
| | c.425A > G (p.Glu142Gly) | | | GGGGCAGAAGGAGGTGCTGCTG′] |
| 4243 | NM_018105.2(THAP1): c.70A > G | 55145 | THAP1 | [′CAAGGACAAGCCCGTTTCTTTCCACRAGTG |
| | (p.Lys24Glu) | | | AGGACCCTGCGCGCCTCGCGG′] |
| 4244 | NM_000933.3(PLCB4): | 5332 | PLCB4 | [′AACAAACGGCAAATGAGTCGCATTTRCCC |
| | c.1868A > G (p.Tyr623Cys) | | | CAAGGGAGGCCGAGTCGATTCC′] |
| 4245 | NM_001172646.1(PLCB4): | 5332 | PLCB4 | [′CACTACTTCATCAGTTCTTCCCATAVCACT |
| | c.986A > G (p.Asn329Ser) | | | TATCTCACTGGCAGACAGTTC′] |
| 4246 | NM_005850.4(SF3B4): c.1A > G | 10262 | SF3B4 | [′GGGAGACGGCGGGATCTCTTTCGCCRTGG |
| | (p.Met1Val) | | | CTGCCGGGCCGATCTCCGAGCG′] |
| 4247 | NM_014714.3(IFT140): | 9742 | IFT140 | [′TGGGACATAGAACGAGGAGAGAATTRTAT |
| | c.932A > G (p.Tyr311Cys) | | | ACTGAGTCCAGATGAGAAGTTT′] |
| 4248 | NM_000258.2(MYL3): c.517A > G | 4634 | MYL3 | [′GACAGAAGACGAAGTGGAGAAGTTGRTGG |
| | (p.Met173Val) | | | CTGGGCAAGAGGACTCCAATGG′] |
| 4249 | NM_032578.3(MYPN): c.59A > G | 84665 | MYPN | [′ATATCTCAGCTTCTAAGAGAGAGCTRTTTA |
| | (p.Tyr20Cys) | | | GCTGAAACCAGACATCGGGGA′] |
| 4250 | NM_001018005.1(TPM1): | 7168 | TPM1 | [′TGAGTTTGCGGAGAGGTCAGTAACTRAAT |
| | c.742A > G (p.Lys248Glu) | | | TGGAGAAAAGCATTGATGACTT′] |
| 4251 | NM_005006.6(NDUFS1): | 4719 | NDUFS1 | [′AGCTGCTTACACAGAGAAGTCTGCTRCAT |
| | Gc.1783A > (p.Thr595Ala) | | | ATGTCAACACTGAGGGTAGAGC′] |
| 4252 | NM_033360.3(KRAS): c.439A > G | 3845 | KRAS | [′AATTCCTTTTATTGAAACATCAGCARAGAC |
| | (p.Lys147Glu) | | | AAGACAGGTAAGTAACACTGA′] |
| 4253 | NM_014236.3(GNPAT): | 8443 | GNPAT | [′GAAGATGAACTCATCTGCAAAAACAHCAC |
| | c.1556A > G (p.Asp519Gly) | | | GTAGGAAGCGAAAGCAACTGTA′] |
| 4254 | NM_017565.3(FAM20A): | −1 | — | [′GGCACCCGTCGGAAGTCCAGAATCCYGCA |
| | c.813 − 2A > G | | | AGAGAGGAAGCTCTGTTCCATC′] |
| 4255 | NM_017565.3(FAM20A): | 54757 | FAM20A | [′AGGCTTTCTCATCTTGACTGTAATCYGCAA |
| | c.590 − 2A > G | | | AGGAGGAGAAGGGCAATGAGA′] |
| 4256 | NM_017636.3(TRPM4): | 54795 | TRPM4 | [′CTGCTTCACATCTTCACGGTCAACARACAG |
| | c.2741A > G (p.Lys914Arg) | | | CTGGGGCCCAAGATCGTCATC′] |
| 4257 | NM_000076.2(CDKNIC): | 1028 | CDKNIC | [′GCTGTCGCCCGCAGATTTCTTCGCCRAGCG |
| | Gc.832A > (p.Lys278Glu) | | | CAAGAGATCAGCGCCTGAGAA′] |
| 4258 | NM_022912.2(REEP1): | 65055 | REEP1 | [′AGTGTGCCTCTGTTTTTCCTTTGACRGGAA |
| | c.304 − 2A > G | | | ATCGATGATTGTCTGGTCCAA′] |
| 4259 | NM_000053.3(ATP7B): | 540 | ATP7B | [′TGTGACATTCTTCGACACGCCCCCCRTGCT |
| | c.2305A > G (p.Met769Val) | | | CTTTGTGTTCATTGCCCTGGG′] |
| 4260 | NM_000053.3(ATP7B): | 540 | ATP7B | [′GTCCACACCCATGCTCTGCAGCGTGYGCA |
| | c.3620A > G (p.His1207Arg) | | | CAGCCAGGGCAGCCTCCTGCTT′] |
| 4261 | NM_000492.3(CFTR): | 1080 | CFTR | [′ACATTTTGTGTTTATGTTATTTGCARTGTTT |
| | c.3140 − 26A > G | | | TCTATGGAAATATTTCACAG′] |
| 4262 | NM_000570.4(FCGR3B): | 2215 | FCGR3B | [′GCTCGAGGCCTGGCTTGAGATGAGGYTCT |
| | Gc.194A > (p.Asn65Ser) | | | CATTGTGAAACCACTGTGTGGA′] |
| 4263 | NM_198253.2(TERT): c.2705A > G | 7015 | TERT | [′TATGGCTGCGTGGTGAACTTGCGGARGAC |
| | (p.Lys902Arg) | | | AGTGGTGAACTTCCCTGTAGAA′] |
| 4264 | NM_005022.3(PFN1): c.350A > G | 5216 | PFN1 | [′GTTGATCAAACCACCGTGGACACCTYCTTT |
| | (p.Glu117Gly) | | | GCCCATCAGCAGGACTAGCGC′] |
| 4265 | NM_005349.3(RBPJ): c.188A > G | 3516 | RBPJ | [′GTTGCACAGAAGTCATATGGAAATGRAAA |
| | (p.Glu63Gly) | | | AAGGTAAGATTATTTTTCTGGT′] |
| 4266 | NM_005349.3(RBPJ): c.505A > G | 3516 | RBPJ | [′GATAAAAGTCATCTCCAAACCTTCCRAAA |
| | (p.Lys169Glu) | | | AGAAGCAGTCATTGAAAAATGC′] |
| 4267 | NM_022787.3(NMNAT1): | 64802 | NMNAT1 | [′GGTCATCCTGGCCCCTTTGCAGAGARACAC |
| | c.817A > G (p.Asn273Asp) | | | TGCAGAAGCTAAGACATAGGA′] |
| 4268 | NM_020921.3(NIN): c.3665A > G | 51199 | NIN | [′CACAGAAACATCAAAAAGTAGGTCCYGTT |
| | (p.Gln1222Arg) | | | TCTTTTCAGAAGCTCGATCACA′] |
| 4269 | NM_020921.3(NIN): c.5126A > G | 51199 | NIN | [′AAAATCTCTAGTGTTCTAAGCTACARCGAA |
| | (p.Asn1709Ser) | | | AAACTGCTGAAAGAAAAGGAA′] |
| 4270 | NM_005340.6(HINT1): c.152A > G | 3094 | HINT1 | [′GACATTTCCCCTCAAGCACCAACACRTTTT |
| | (p.His51Arg) | | | CTGGTGATACCCAAGAAACAT′] |
| 4271 | NM_005050.3(ABCD4): c.956A > G | 5826 | ABCD4 | [′GAGCTGGGTGAAGCAGCTGATGAGGYAGA |
| | (p.Tyr319Cys) | | | TGCACACAAAGGCATTCTGGAC′] |
| 4272 | NM_000155.3(GALT): c.950A > G | 2592 | GALT | [′GCTGGGGCCAACTGGAACCATTGGCRGCT |
| | (p.Gln317Arg) | | | GCACGCTCATTACTACCCTCCG′] |
| 4273 | NM_007294.3(BRCA1): | 672 | BRCA1 | [′ACTTGCTGAGTGTGTTTCTCAAACARTTTA |
| | c.213 − 12A > G | | | ATTTCAGGAGCCTACAAGAAA′] |
| 4274 | NM_007294.3(BRCA1): | 672 | BRCA1 | [′GCAAAGCATGGATTCAAACTTAGGTRTTG |
| | c.4096 + 3A> G | | | GAACCAGGTTTTTGTGTTTGCC′] |
| 4275 | NM_007294.3(BRCA1): | 672 | BRCA1 | [′TGATGGGTTGTGTTTGGTTTCTTTCVGCAT |
| | c.5194 − 2A > G | | | GATTTTGAAGTCAGAGGAGAT′] |
| 4276 | NM_007294.3(BRCA1): | 672 | BRCA1 | [′GTGCAGCCAGATGCCTGGACAGAGGRCAA |
| | c.5453A > G (p.Asp1818Gly) | | | TGGCTTCCATGGTAAGGTGCCT′] |
| 4277 | NM_000059.3(BRCA2): | 675 | BRCA2 | [′TATGCTATACATGATGAAACATCTTRTAAA |
| | c.1799A > G (p.Tyr600Cys) | | | GGAAAAAAAATACCGAAAGAC′] |
| 4278 | NM_000059.3(BRCA2): | 675 | BRCA2 | [′ACAATTTTCCCCTTTTTTTACCCCCRGTGGT |
| | c.476 − 2A > G | | | ATGTGGGAGTTTGTTTCATA′] |
| 4279 | NM_000059.3(BRCA2): | 675 | BRCA2 | [′AAAGTGGCCATTATTGAACTTACAGNTGG |
| | c.8168A > G (p.Asp2723Gly) | | | GTGGTATGCTGTTAAGGCCCAG′] |
| 4280 | NM_000059.3(BRCA2): | 675 | BRCA2 | [′GAATTAATAATCCTTTTGTTTTCTTDGAAA |
| | c.8633 − 2A > G | | | ACACAACAAAACCATATTTAC′] |
| 4281 | NM_000060.3(BTD): c.629A > G | 686 | BTD | [′AATAATGGAACCCTTGTTGACCGCTRCCGT |
| | (p.Tyr210Cys) | | | AAACACAACCTCTACTTTGAG′] |
| 4282 | NM_000060.3(BTD): c.968A > G | 686 | BTD | [′ACCCCTCTGGAGTCCTTTTGGTACCRTGAC |
| | (p.His323Arg) | | | ATGGAAAATCCCAAAAGTCAC′] |
| 4283 | NM_000155.3(GALT): c.857A > G | 2592 | GALT | [′ATCATGAAGAAGCTCTTGACCAAGTRTGA |
| | (p.Tyr286Cys) | | | CAACCTCTTTGAGACGTCCTTT′] |
| 4284 | NM_000060.3(BTD): c.128A > G | 686 | BTD | [′TGTTACGTGGTTGCCCTGGGAGCCCRCACC |
| | (p.His43Arg) | | | GGGGAGGAGAGCGTGGCTGAC′] |
| 4285 | NM_002437.4(MPV17): c.262A > G | 4358 | MPV17 | [′CACCACCAAAGTGGATGCACTGAAGRAGA |
| | (p.Lys88Glu) | | | TGTTGTTGGATCAGGTGAGCAG′] |
| 4286 | NM_002769.4(PRSS1): c.65A > G | −1 | — | [′GTTGCTGCCCCCTTTGATGATGATGRCAAG |
| | (p.Asp22Gly) | | | ATCGTTGGGGGCTACAACTGT′] |
| 4287 | NM_005211.3(CSF1R): | 1436 | CSF1R | [′GACTAACCCTGCAGTGCTTTCCCTCRGTGC |
| | 2c.2320 − A > G | | | ATCCACCGGGACGTGGCAGCG′] |
| 4288 | NM_024312.4(GNPTAB): | 79158 | GNPTAB | [′GAAAACGTTTCTTTTTCTTTGTTCTRGGTG |
| | c.118 − 2A > G | | | GTTCTGGAATGGAGCCGAGAT′] |
| 4289 | NM_000495.4(COL4A5): | 1287 | COL4A5 | [′AAATATTATATATCACATATTTTCARCAGG |
| | c.3107 − 4A > G | | | GCCTCAGGGTGTGGAAGGGCC′] |
| 4290 | NM_000282.3(PCCA): c.862A > G | 5095 | PCCA | [′TGGGAATGCTTTATGGCTTAATGAANGAG |
| | (p.Arg288Gly) | | | AGTGCTCAATTCAGAGAAGAAA′] |
| 4291 | NM_000288.3(PEX7): c.854A > G | 5191 | PEX7 | [′TCTCTTCTTGAAACAGTGGAGCATCRTACA |
| | (p.His285Arg) | | | GAGTTTACTTGTGGTTTAGAC′] |
| 4292 | NM_000532.4(PCCB): c.1606A > G | 5096 | PCCB | [′ACAACGTCCTTGGAGAAAACATGCARATA |
| | (p.Asn536Asp) | | | TTCCATTGTAAACAAATCAAAG′] |
| 4293 | NM_000553.4(WRN): | 7486 | WRN | [′TCAAAGGAAAAATACATTTAAGATTVTAA |
| | c.2089 − 3024A > G | | | GTCTGGTTATAAGCTTAAAAAG′] |
| 4294 | NM_001039958.1(MESP2): | 145873 | MESP2 | [′GCGGCAGAGCGCCAGCGAGCGGGAGRAA |
| | c.271A > G (p.Lys91Glu) | | | CTGCGCATGCGCACGCTGGCCCG′] |
| 4295 | NM_001099274.1(TINF2): | 26277 | TINF2 | [′TAGGGGAGGCCATAAGGAGCGCCCCRCAG |
| | c.850A > G (p.Thr284Ala) | | | TCATGCTGTTTCCCTTTAGGAA′] |
| 4296 | NM_001099274.1(TINF2): | 26277 | TINF2 | [′CCCCACAGTCATGCTGTTTCCCTTTRGGAA |
| | c.871A > G (p.Arg291Gly) | | | TCTCGGCTCACCAACCCAGGT′] |
| 4297 | NM_001363.4(DKC1): c.115A > G | 1736 | DKC1 | [′ACAACACGCTGAAGAATTTCTTATCRAACC |
| | (p.Lys39Glu) | | | TGAATCCAAAGTTGCTAAGTT′] |
| 4298 | NM_001363.4(DKC1): c.127A > G | 1736 | DKC1 | [′AGAATTTCTTATCAAACCTGAATCCRAAGT |
| | (p.Lys43Glu) | | | TGCTAAGTTGGACACGTCTCA′] |
| 4299 | NM_001363.4(DKC1): c.196A > G | 1736 | DKC1 | [′GAATTTTGATAAGCTGAATGTAAGGRCAA |
| | (p.Thr66Ala) | | | CACACTATACACCTCTTGCATG′] |
| 4300 | NM_001363.4(DKC1): c.941A > G | 1736 | DKC1 | [′GTAAATGCCATCTGCTATGGGGCCARGATT |
| | (p.Lys314Arg) | | | ATGCTTCCAGGTGTTCTTCGA′] |
| 4301 | NM_004614.4(TK2): c.173A > G | 7084 | TK2 | [′GCATGTCGTCTTCCCACTTGCAATAYTGCC |
| | (p.Asn58Ser) | | | CTCGACACAGATCTGGCAAAA′] |
| 4302 | NM_004614.4(TK2): c.278A > G | 7084 | TK2 | [′AACCAACAACCCACTCACCAGAGGAYTGT |
| | (p.Asn93Ser) | | | GGCCACGGACATTTCTCCACTT′] |
| 4303 | NM_004614.4(TK2): c.562A > G | 7084 | TK2 | [′AGTTTACCTTCGGACCAATCCTGAGRCTTG |
| | (p.Thr188Ala) | | | TTACCAGAGGTTAAAGAAGAG′] |
| 4304 | NM_024312.4(GNPTAB): | 79158 | GNPTAB | [′TTTATTTTCTCTTTGGTTTTATCGTRGGTTT |
| | c.1285 − 2A > G | | | ATTTGACATGGCCTGTGCCA′] |
| 4305 | NM_024312.4(GNPTAB): | 79158 | GNPTAB | [′TTCACATCGCGGAAAGTCCCTGCTCRCATG |
| | c.2867A > G (p.His956Arg) | | | CCTCACATGATTGACCGGATT′] |
| 4306 | NM_024312.4(GNPTAB): | 79158 | GNPTAB | [′AGGAAGTTTGTTTGCCTGAATGACARCATT |
| | c.3458A > G (p.Asn1153Ser) | | | GACCACAATCATAAAGATGCT′] |
| 4307 | NM_024312.4(GNPTAB): | 79158 | GNPTAB | [′AGCAAAAATACTGGGAGGCAACTAARAGA |
| | c.2783A > G (p.Lys928Arg) | | | TACATTTGCAGATTCCCTCAGA′] |
| 4308 | NM_198253.2(TERT): c.2537A > G | 7015 | TERT | [′TCCACGCTGCTCTGCAGCCTGTGCTRCGGC |
| | (p.Tyr846Cys) | | | GACATGGAGAACAAGCTGTTT′] |
| 4309 | NM_198578.3(LRRK2): | 120892 | LRRK2 | [′TAGAGAAACTGGAGCAGCTCATTTTRGAA |
| | c.3342A > G (p.Leu1114=) | | | GGGTAAGAAAGAGCTCATTAAA′] |
| 4310 | NM_198578.3(LRRK2): | 120892 | LRRK2 | [′TTTGGCTGACCTGCCTAGAAATATTRTGTT |
| | c.5605A > G (p.Met1869Val) | | | GAATAATGATGAGTTGGAATT′] |
| 4311 | NM_207352.3(CYP4V2): | 285440 | CYP4V2 | [′TTCAAAGCAAATTGACAAATCCTCTRTGTA |
| | c.367A > G (p.Met123Val) | | | CAAGTTTTTAGAACCATGGCT′] |
| 4312 | NM_207352.3(CYP4V2): | 285440 | CYP4V2 | [′CTTATGTTTAAAGAAGGATGGGAACRCAA |
| | c.761A > G (p.His254Arg) | | | AAAGAGCCTTCAGATCCTACAT′] |
| 4313 | NR_001566.1(TERC): n.37A > G | 7012 | TERC | [′GGTGGGCCTGGGAGGGGTGGTGGCCDTTT |
| | | | | TTTGTCTAACCCTAACTGAGAA′] |
| 4314 | NR_001566.1(TERC): n.48A > G | 7012 | TERC | [′GAGGGGTGGTGGCCATTTTTTGTCTRACCC |
| | | | | TAACTGAGAAGGGCGTAGGCG′] |
| 4315 | NM_007171.3(POMT1): c.430A > G | 10585 | POMT1 | [′CATGTGTTTCCTCTTTGAAACAGAGRATGC |
| | (p.Asn144Asp) | | | TCTCATCACTCAGTCAAGGCT′] |
| 4316 | NM_003863.3(DPM2): c.68A > G | 8818 | DPM2 | [′GCCGTTAGCCTGATCATCTTCACCTRCTAC |
| | (p.Tyr23Cys) | | | ACCGCCTGGGTGATTCTCTTG′] |
| 4317 | NM_000030.2(AGXT): c.1020A > G | 189 | AGXT | [′GGAGAGACATCGTCAGCTACGTCATRGAC |
| | (p.Ile340Met) | | | CACTTCGACATTGAGATCATGG′] |
| 4318 | NM_031418.2(ANO3): c.2053A > G | 63982 | ANO3 | [′TTATGTTCTATTTCAGTGTCATCCTRGTGG |
| | (p.Ser685Gly) | | | CTGTTTGATAGACCTCTGCCT′] |
| 4319 | NM_183075.2(CYP2U1): | 113612 | CYP2U1 | [′CCTTTTTACATAGAAAAGGTTCATGRAGAA |
| | c.1139A > G (p.Glu380Gly) | | | ATTGAAAGAGTCATTGGCGCC′] |
| 4320 | NM_003094.3(SNRPE): c.1A > G | 6635 | SNRPE | [′GGTGTGCTCTTTGTGAAATTCCACCRTGGC |
| | (p.Met1Val) | | | GTACCGTGGCCAGGGTCAGAA′] |
| 4321 | NM_000344.3(SMN1): c.389A > G | 6606 | SMN1 | [′ACCTGTGTTGTGGTTTACACTGGATRTGGA |
| | (p.Tyr130Cys) | | | AATAGAGAGGAGCAAAATCTG′] |
| 4322 | NM_012082.3(ZFPM2): | −1 | — | [′CATGCAGAGAACCATGCGCACACGCRAGC |
| | c.2209A > G (p.Lys737Glu) | | | GCAGAAAGATGTATGAGATGTG′] |
| 4323 | NM_006364.2(SEC23A): | 10484 | SEC23A | [′TGTTCAGTGTCAATGTATCTTGGCAYTGGA |
| | Gc.2104A > G (p.Met702Val) | | | AATCTGGAGTGAAGAATTTCC′] |
| 4324 | NM_001139.2(ALOX12B): | 242 | ALOX12B | [′ACCCTCCACGGCTGCGTCACTCGGGYAAT |
| | c.1562A > G (p.Tyr521Cys) | | | AATAGGTGATGATCTCCGTCAC′] |
| 4325 | NM_001004434.2(SLC30A2): | 7780 | SLC30A2 | [′GTGACTGTCAGGACCCTTCTGAGCAYGGC |
| | c.161A > G (p.His54Arg) | | | AGTGATGGTTGCTCTGGGCAGC′] |
| 4326 | NM_001168272.1(ITPR1): | 3708 | ITPR1 | [′CACTATCACTGCCCTGCTCCACAATRATCG |
| | c.1759A > G (p.Asn587Asp) | | | GAAACTCCTGGAAAAACACAT′] |
| 4327 | m.15923A > G | −1 | — | [′ATAAACTAATACACCAGTCTTGTAARCCG |
| | | | | GAGATGAAAACCTTTTTCCAAG′] |
| 4328 | NM_007332.2(TRPA1) | −1 | — | [′TTTTTTTACTTTTCTAGATTTGAAARTTGTG |
| | c.2564A > G (p.Asn855Ser) | | | GAATTTTTATTGTTATGTTG′] |
| 4329 | NM_014254.2(TMEM5): | 10329 | TMEM5 | [′CCGGTCGGAGTAAACACAGAATGCTRTCG |
| | c.1016A > G (p.Tyr339Cys) | | | AATCTATGAGGCTTGCTCCTAT′] |
| 4330 | NM_144577.3(CCDC114): | 93233 | CCDC114 | [′ACTGATTTTTTTCTCCTCCCCCCACRGGAG |
| | c.487 − 2A > G | | | ATCCACCACCTGCATCACCTG′] |
| 4331 | NM_000834.3(GRIN2B): | 2904 | GRIN2B | [′GGATTTGTTTGCTTTTTTCCTGTACRGGAA |
| | c.2172 − 2A > G | | | ACTGGATGCCTTCATCTATGA′] |
| 4332 | NM_018486.2(HDAC8): c.539A > G | 55869 | HDAC8 | [′ATTCTCTACGTGGATTTGGATCTGCRCCAT |
| | (p.His180Arg) | | | GGAGATGGTAAGCCCTTTGGT′] |
| 4333 | NM_018486.2(HDAC8): | 55869 | HDAC8 | [′ACACTATCCTCTGAGATCCCAGATCRTGAG |
| | c.1001A > G (p.His334Arg) | | | GTAAGTAAGGCTCTGACAAGT′] |
| 4334 | NM_178012.4(TUBB2B): | 347733 | TUBB2B | [′GCAGACCTGCGCAAGCTGGCGGTGARCAT |
| | c.767A > G (p.Asn256Ser) | | | GGTGCCCTTCCCTCGCCTGCAC′] |
| 4335 | NM_006888.4(CALM1): c.293A > G | 801 | CALM1 | [′ATTGCTGAATGTTCACAGGATGGCARTGGT |
| | (p.Asn98Ser) | | | TATATCAGTGCAGCAGAACTA′] |
| 4336 | NM_172107.2(KCNQ2): | 3785 | KCNQ2 | [′GCCCCACCCACCCCCCTGCAGTGTCRTGCG |
| | c.1636A > G (p.Met546Val) | | | GTTCCTGGTGTCCAAGCGGAA′] |
| 4337 | NM_001866.2(COX7B): | 1349 | COX7B | [′TGTATTCTTTTTTCGTTTTCCTGTARGTTCG |
| | c.41 − 2A > G | | | AAGCATTCAGCAAACAATGG′] |
| 4338 | NM_001099922.2(ALG13): | 79868 | ALG13 | [′TGAACAATCATCAGCTGGAACTGGCRAAG |
| | c.339A > G (p.Ala113=) | | | CAGCTACACAAAGAGGGTCATC′] |
| 4339 | NM_001083614.1(EARS2): | 124454 | EARS2 | [′CCCCATCAGGTATGACAATCGGTGCRGGA |
| | c.502A > G (p.Arg168Gly) | | | ACATGAGCCAGGAGCAGGTGGC′] |
| 4340 | NM_001083614.1(EARS2): | 124454 | EARS2 | [′TGCCTTGTACAACTACATCTTTGCTRAGAA |
| | c.193A > G (p.Lys65Glu) | | | GTACCAGGGGAGCTTCATCCT′] |
| 4341 | NM_033109.4(PNPT1): | 87178 | PNPT1 | [′ACCCTTCATGGATCAGCATTATTTCRAAGA |
| | c.1160A > G (p.Gln387Arg) | | | GGACAAACACAGGTAATTTAT′] |
| 4342 | NM_033109.4(PNPT1): | 87178 | PNPT1 | [′CCTTTCACCATAAGAGTTACATCTGRAGTC |
| | c.1424A > G (p.Glu475Gly) | | | CTAGAGTCAAATGGTATGGTA′] |
| 4343 | NM_000390.2(CHM): c.1520A > G | 1121 | CHM | [′ATTTTTTTTTTAACAGATTTGGTTCRTTTGA |
| | (p.His507Arg) | | | CTTGCACATCTTCTAAAACA′] |
| 4344 | NM_181690.2(AKT3): c.686A > G | 10000 | AKT3 | [′TTGTGTTTTGTGATGGAATATGTTARTGGG |
| | (p.Asn229Ser) | | | GGCGAGGTGAGTCAAGAAGTA′] |
| 4345 | NM_006567.3(FARS2): c.431A > G | 10667 | FARS2 | [′CCCAGCAGGAAGAAGGGGGACAACTRTTA |
| | (p.Tyr144Cys) | | | CCTGAATCGGACTCACATGCTG′] |
| 4346 | NM_001410.2(MEGF8): | 1954 | MEGF8 | [′CAAGTGCCGGGAATCATTTCACGGGRGTC |
| | c.7099A > G (p.Ser2367Gly) | | | CGCTGGGCGGCCAGCAGTGCTA′] |
| 4347 | NM_003124.4(SPR): | 6697 | SPR | [′CCTCATCGTCTCCTTTTCATCCTCTRGGTCC |
| | c.596 − 2A > G | | | TCTGGACACAGACATGCAGC′] |
| 4348 | NM_005609.2(PYGM): c.152A > G | 5837 | PYGM | [′GACCGCAATGTGGCCACCCCACGAGRCTA |
| | (p.Asp51Gly) | | | CTACTTTGCTCTGGCCCATACC′] |
| 4349 | NM_004247.3(EFTUD2): | 9343 | EFTUD2 | [′TTACTTAGTATTTGCTTTTCAGGACRTGTG |
| | Gc.623A > (p.His208Arg) | | | AATTTCTCTGATGAGGTCACA′] |
| 4350 | NM_001310338.1(MGME1): | 92667 | MGME1 | [′GCTGTTCAACATGAAACCTTAAACTRTATA |
| | c.743A > G (p.Tyr248Cys) | | | GGTCTGCTGGACTGTGTGGCT′] |
| 4351 | NM_001128085.1(ASPA): | −1 | — | [′AAGAAAGACGTTTTTGATTTTTTTCRGACT |
| | c.433 − 2A > G | | | TCTCTGGCTCCACTACCCTGC′] |
| 4352 | NM_000108.4(DLD): c.1444A > G | 1738 | DLD | [′TGGAGCATCCTGTGAAGATATAGCTRGAG |
| | (p.Arg482Gly) | | | TCTGTCATGCACATCCGGTAAT′] |
| 4353 | NM_007215.3(POLG2): | 11232 | POLG2 | [′ACTAACATTAAGAACAAACAAACCCNTAT |
| | c.1105A > G (p.Arg369Gly) | | | TTTTAGTTTCCCAAGTCTATCT′] |
| 4354 | NM_004333.4(BRAF): c.2126A > G | 673 | BRAF | [′AGAGATGAGAGACCACTCTTTCCCCRAGT |
| | (p.Gln709Arg) | | | AAGTAAAAGCTTCATGCTATCC′] |
| 4355 | NM_004985.4(KRAS): c.65A > G | 3845 | KRAS | [′GTAGGCAAGAGTGCCTTGACGATACDGCT |
| | (p.Gln22Arg) | | | AATTCAGAATCATTTTGTGGAC′] |
| 4356 | NM_004985.4(KRAS): c.458A > G | 3845 | KRAS | [′ACTTTTTATGTATTTCAGGGTGTTGDTGAT |
| | (p.Asp153Gly) | | | GCCTTCTATACATTAGTTCGA′] |
| 4357 | NM_002834.3(PTPN11): | 5781 | PTPN11 | [′TAGTAAAAGTAACCCTGGAGACTTCRCAC |
| | c.124A > G (p.Thr42Ala) | | | TTTCCGTTAGGTAAGTTGGAAT′] |
| 4358 | NM_002834.3(PTPN11): | 5781 | PTPN11 | [′AGCTGTCACCCACATCAAGATTCAGNACA |
| | c.172A > G (p.Asn58Asp) | | | CTGGTGATTACTATGACCTGTA′] |
| 4359 | NM_002834.3(PTPN11): | 5781 | PTPN11 | [′TTTCTTTCTTTCCAGACACTACAACRACAG |
| | c.767A > G (p.Gln256Arg) | | | GAGTGCAAACTTCTCTACAGC′] |
| 4360 | NM_002834.3(PTPN11): | 5781 | PTPN11 | [′CAAAAACAAAAATAGATATAAAAACRTCC |
| | c.844A > G (p.Ile282Val) | | | TGCCCTGTAAGTATCAATATTC′] |
| 4361 | NM_002834.3(PTPN11): | 5781 | PTPN11 | [′GATGGTGCGGTCTCAGAGGTCAGGGRTGG |
| | c.1510A > G (p.Met504Val) | | | TCCAGACAGAAGCACAGTACCG′] |
| 4362 | NM_002880.3(RAF1): c.524A > G | 5894 | RAF1 | [′ACTTGTGGCTACAAATTTCATGAGCRCTGT |
| | (p.His175Arg) | | | AGCACCAAAGTACCTACTATG′] |
| 4363 | NM_002880.3(RAF1): c.1279A > G | 5894 | RAF1 | [′AATTGTGACCCAGTGGTGCGAGGGCRGCA |
| | (p.Ser427Gly) | | | GCCTCTACAAACACCTGCATGT′] |
| 4364 | NM_005633.3(SOS1): c.508A > G | 6654 | SOS1 | [′TATTAAAGTGGCAATGTGTGCTGACRAGG |
| | (p.Lys170Glu) | | | TAGGAAACTGAGCTTTTCTATT′] |
| 4365 | NM_030662.3(MAP2K2): | 5605 | MAP2K2 | [′GCGGCTGGAAGCCTTTCTCACCCAGRAAG |
| | c.181A > G (p.Lys61Glu) | | | CCAAGGTCGGCGAACTCAAAGA′] |
| 4366 | NM_024334.2(TMEM43): | 79188 | TMEM43 | [′GGAGAATGAAGGAAGGCTGGTGCACRTCA |
| | c.271A > G (p.Ile91Val) | | | TTGGCGCCTTACGGACATCCAA′] |
| 4367 | NM_000084.4(CLCN5): | 1184 | CLCN5 | [′CTGATGGCTGCAGCCATGACAAGCARGTG |
| | c.1637A > G (p.Lys546Arg) | | | GGTGGCAGATGCTCTTGGGCGG′] |
| 4368 | NM_000084.4(CLCN5): c.815A > G | 1184 | CLCN5 | [′CCTTCTTTCTTCTAGGTCAGCTACTRTTTTC |
| | (p.Tyr272Cys) | | | CCCTCAAAACATTGTGGCGT′] |
| 4369 | NM_000095.2(COMP): c.1760A > G | 1311 | COMP | [′GGCGTGGACTTCGAGGGCACGTTCCRTGT |
| | (p.His587Arg) | | | GAACACGGTCACGGATGACGAC′] |
| 4370 | NM_000530.6(MPZ): c.389A > G | 4359 | MPZ | [′AATGGCACGTTCACTTGTGACGTCARAAA |
| | (p.Lys130Arg) | | | CCCTCCAGACATAGTGGGCAAG′] |
| 4371 | NM_000530.6(MPZ): c.347A > G | 4359 | MPZ | [′AAGGATGGCTCCATTGTCATACACARCCTA |
| | (p.Asn116Ser) | | | GACTACAGTGACAATGGCACG′] |
| 4372 | NM_003611.2(OFD1): c.260A > G | 8481 | OFD1 | [′GCAGATCACTTACAAAGATGTGGCTDTGA |
| | (p.Tyr87Cys) | | | ATATTCACTTTCTGTTTTCTTT′] |
| 4373 | NM_003611.2(OFD1): c.290A > G | 8481 | OFD1 | [′TATTCACTTTCTGTTTTCTTTCCAGRAAGTG |
| | (p.Glu97Gly) | | | GTTTGGCAAAAGAAAAGGTA′] |
| 4374 | NM_003611.2(OFD1): | 8481 | OFD1 | [′TAAAAGTGAAATATTTTCTTTTAACRGGTT |
| | c.382 − 2A > G | | | TCAGGATCTGATAAAGAAAAT′] |
| 4375 | NM_003977.3(AIP): c.721A > G | 9049 | AIP | [′GCTGCTGCTCAACTACTGCCAGTGCDAGCT |
| | (p.Lys241Glu) | | | GGTGGTCGAGGAGTACTACGA′] |
| 4376 | NM_006158.4(NEFL): c.293A > G | 4747 | NEFL | [′GAGAAGGCGCAGCTCCAGGACCTCARTGA |
| | (p.Asn98Ser) | | | CCGCTTCGCCAGCTTCATCGAG′] |
| 4377 | NM_024312.4(GNPTAB): | 79158 | GNPTAB | [′ATATCTCAAGTCTTTGATGAAGTTGRTACA |
| | c.3053A > G (p.Asp1018Gly) | | | GATCAATCTGGTGTCTTGTCT′] |
| 4378 | NM_025137.3(SPG11): | 80208 | SPG11 | [′TAAAGCTAACTTTTATTTTTCCTATRGAGA |
| | c.1457 − 2A > G | | | ATGGACTCTCTCTGATTTTGT′] |
| 4379 | NM_025137.3(SPG11): | 80208 | SPG11 | [′ACAAGAATCCATCCTTCTCCCCAGGRTAAG |
| | c.2608A > G (p.Ile870Val) | | | TCCAGAAGGCAAGTGTGAGAG′] |
| 4380 | NM_025137.3(SPG11): | 80208 | SPG11 | [′GAATGAAATTTTAGATAAGCTGGCCRGGT |
| | c.2833A > G (p.Arg945Gly) | | | ATTATAACTGTTGAACTAATAC′] |
| 4381 | NM_025137.3(SPG11): | 80208 | SPG11 | [′CAGTGAGGAGTATGGGCTGGTGGTARGTA |
| | c.6477 + 4A > G | | | GCCCCCTCAACCCCAGTCTCCA′] |
| 4382 | NM_212472.2(PRKARIA): | 5573 | PRKARIA | [′ATTTTGCAAACTCGTAATTTCTTTCRGGAG |
| | c.178 − 2A > G | | | GAGGCAAAACAGATTCAGAAT′] |
| 4383 | NM_006231.3(POLE): | 5426 | POLE | [′CCAGTTCAGCTACCTGGAACCAGGTRTGG |
| | c.4444 + 3A > G | | | CCTGCACCAGCCGCCCATCATG′] |
| 4384 | NM_003156.3(STIM1): c.251A > G | 6786 | STIM1 | [′GACGATGATGCCAATGGTGATGTGGRTGT |
| | (p.Asp84Gly) | | | GGAAGAAAGTGATGAGGTGAGC′] |
| 4385 | NM_003156.3(STIM1): c.326A > G | 6786 | STIM1 | [′CCAACAGTGAAACACAGCACCTTCCRTGG |
| | (p.His 109Arg) | | | TGAGGATAAGCTCATCAGCGTG′] |
| 4386 | NM_001128425.1(MUTYH): | 4595 | MUTYH | [′GGCTAAGAGCTGTTCCTGCTCCACCYGAG |
| | c.934 − 2A > G | | | AGGCACAGGGTTGAGTGTCATA′] |
| 4387 | NM_133499.2(SYN1): c.1699A > G | 6853 | SYN1 | [′GGCGGAGCCGGGCCAGAGACGGATGYCTG |
| | (p.Thr567Ala) | | | ACGGGTAGCCTGTGGGGGGCCC′] |
| 4388 | NM_021629.3(GNB4): c.265A > G | 59345 | GNB4 | [′TATTTGGGATAGCTATACAACAAATRAGG |
| | (p.Lys89Glu) | | | TAGAATTTCTTCATAATTCTTT′] |
| 4389 | NM_138425.3(C12orf57): | 113246 | C12orf57 | [′CTGAACCTAGAGCTTCAGACGCCCTRTGGC |
| | c.1A > G (p.Met1Val) | | | GTCCGCCTCGACCCAACCGGC′] |
| 4390 | NM_000096.3(CP): c.2953A > G | 1356 | CP | [′GGGAGATGAAGTCAACTGGTATCTGRTGG |
| | (p.Met985Val) | | | GAATGGGCAATGAAATAGACTT′] |
| 4391 | NM_000057.3(BLM): | 641 | BLM | [′AATATTAACAACATAATTATTTTATRGCTA |
| | c.1088 − 2A > G | | | GACAGATAAGTTTACAGCAGC′] |
| 4392 | NM_000257.3(MYH7): c.5807A > G | 4625 | MYH7 | [′TTTCAAAAGGGCTTGAATGAGGAGTRGCT |
| | (p.Ter1936Trp) | | | TTGCCACATCTTGATCTGCTCA′] |
| 4393 | NM_152263.3(TPM3): c.505A > G | 7170 | TPM3 | [′GGATCTTTTCCTGTAGGTGGCTCGTRAGTT |
| | (p.Lys169Glu) | | | GGTGATCATTGAAGGAGACTT′] |
| 4394 | NM_152263.3(TPM3): c.733A > G | 7170 | TPM3 | [′AGAGACCCGTGCTGAGTTTGCTGAGRGAT |
| | (p.Arg245Gly) | | | CGGTAGCCAAGCTGGAAAAGAC′] |
| 4395 | NM_000096.3(CP): | 1356 | CP | [′GCATTAAACACTTTTTTCCCCCTGCRGTGA |
| | c.1209 − 2A > G | | | CTCAGCGGTGTTTTTTGAACA′] |
| 4396 | NM_002739.3(PRKCG): c.76A > G | 5582 | PRKCG | [′CCTGTTTTGCAGAAAGGGGGCCCTGRGGC |
| | (p.Arg26Gly) | | | AGAAGGTGGTCCACGAAGTCAA′] |
| 4397 | NM_000138.4(FBN1): | 2200 | FBN1 | [′GTGTTTTGTTTTGTTGTGTTTTTCTRGAGGA |
| | c.1148 − 2A > G | | | TTTCAACAAGCTGTGCTCTG′] |
| 4398 | NM_000138.4(FBN1): c.3058A > G | 2200 | FBN1 | [′ACCCGGATTTGCCACAAAAGAAATTRCAA |
| | (p.Thr1020Ala) | | | ATGGAAAGCCTTTCTTCAAAGG′] |
| 4399 | NM_000169.2(GLA): c.1153A > G | −1 | — | [′GGCCTGTAATCCTGCCTGCTTCATCRCACA |
| | (p.Thr385Ala) | | | GCTCCTCCCTGTGAAAAGGAA′] |
| 4400 | NM_000256.3(MYBPC3): | 4607 | MYBPC3 | [′ACTTCAACGGCCCCTTCTGTTCTACRGCAA |
| | c.1224 − 2A > G | | | GTAAGTTCCCCTCTGGATGGC′] |
| 4401 | NM_000256.3(MYBPC3): | 4607 | MYBPC3 | [′GTCAGCCTCGTCGGCAGGTGTGACGYCGT |
| | c.1814A > G (p.Asp605Gly) | | | CAATGGTCAGTTTGTGGACCCT′] |
| 4402 | NM_000256.3(MYBPC3): | 4607 | MYBPC3 | [′CTCTGAACTACATTGTGTCTTCTGCRGAAC |
| | c.1928 − 2A > G | | | CTCCCAAGATCCACCTGGACT′] |
| 4403 | NM_000256.3(MYBPC3): | 4607 | MYBPC3 | [′GGGCCGCAGGTGCGTCTGGCACGTCBGGA |
| | c.2309 − 2A > G | | | TGGGGTGGGATGGACCCACATC′] |
| 4404 | NM_000256.3(MYBPC3): | 4607 | MYBPC3 | [′GTGGCTTCTTGCTAAAAGCTGAGACYGAA |
| | c.26 − 2A > G | | | GGGCCAGGTGGAGGCTACAGCG′] |
| 4405 | NM_000256.3(MYBPC3): | 4607 | MYBPC3 | [′GGCCACAGCCTAGACTGCGGGACACRGGG |
| | c.927 − 2A > G | | | ACTCGAAGCTGGAGGCACCAGC′] |
| 4406 | NM_000257.3(MYH7): c.2206A > G | 4625 | MYH7 | [′AGCGGCCATCCCTGAGGGACAGTTCRTTG |
| | (p.Ile736Val) | | | ATAGCAGGAAGGGGGCAGAGAA′] |
| 4407 | NM_000257.3(MYH7): c.2681A > G | 4625 | MYH7 | [′CTCCCCTCTGTTCCTCACCTTCAGGDACAA |
| | (p.Glu894Gly) | | | GACAACCTGGCAGATGCTGAG′] |
| 4408 | NM_000260.3(MYO7A): | 4647 | MYO7A | [′CCTTACCCCATCCCTGTGCCCCTGCRGCTT |
| | c.1344 − 2A > G | | | TGAGCAGCTCTGCATCAACTT′] |
| 4409 | NM_000260.3(MYO7A): | 4647 | MYO7A | [′GTGCCAGGGAAGGATCCCATGGCCGRTTC |
| | c.6029A > G (p.Asp2010Gly) | | | CATCTTCCACTATTACCAGGTG′] |
| 4410 | NM_000260.3(MYO7A): | 4647 | MYO7A | [′CTCTCTATGCCCTTTCTGCTCCCCCRGGAT |
| | c.6439 − 2A > G | | | ATCCTCACCACTCATCCCTTC′] |
| 4411 | NM_000441.1(SLC26A4): | −1 | — | [′CCCTCCTCGCTGTCCTCTGGCTCGCRGGTC |
| | c.−3 − 2A > G | | | ATGGCAGCGCCAGGCGGCAGG′] |
| 4412 | NM_000441.1(SLC26A4): | 5172 | SLC26A4 | [′ATTACACCATCGATGGGAACCAGGTDTGG |
| | c.1149 + 3A > G | | | GTGCCCTTTTGCTGAACTGGTT′] |
| 4413 | NM_000551.3(VHL): c.467A > G | 7428 | VHL | [′GATTTGGTTTTTGCCCTTCCAGTGTRTACTC |
| | (p.Tyr156Cys) | | | TGAAAGAGCGATGCCTCCAG′] |
| 4414 | NM_002294.2(LAMP2): | 3920 | LAMP2 | [′AAATATTATTTTTTTAAATGAATCCRGGAG |
| | c.65 − 2A > G | | | CTGTGCGGTCTTATGCATTGG′] |
| 4415 | NM_004004.5(GJB2): c.1A > G | 2706 | GJB2 | [′CAGAGCAAACCGCCCAGAGTAGAAGRTGG |
| | (p.Met1Val) | | | ATTGGGGCACGCTGCAGACGAT′] |
| 4416 | NM_004004.5(GJB2): c.617A > G | 2706 | GJB2 | [′GTGTCTGGAATTTGCATCCTGCTGARTGTC |
| | (p.Asn206Ser) | | | ACTGAATTGTGTTATTTGCTA′] |
| 4417 | NM_033360.3(KRAS): c.182A > G | 3845 | KRAS | [′TTGGATATTCTCGACACAGCAGGTCNAGA |
| | (p.Gln61Arg) | | | GGAGTACAGTGCAATGAGGGAC′] |
| 4418 | NM_006218.2(PIK3CA): | 5290 | PIK3CA | [′GATCCTCTCTCTGAAATCACTGAGCRGGAG |
| | c.1637A > G (p.Gln546Arg) | | | AAAGATTTTCTATGGAGTCAC′] |
| 4419 | NM_006218.2(PIK3CA) | 5290 | PIK3CA | [′TGATGACATTGCATACATTCGAAAGRCCCT |
| | c.3073A > G (p.Thr1025Ala) | | | AGCCTTAGATAAAACTGAGCA′] |
| 4420 | NM_032119.3(ADGRV1): | 84059 | ADGRV1 | [′TTCTTCATGATTTAATTTTTTTCCCRGATCA |
| | c.14973 − 2A > G | | | GGTTTCATTGTTGCTGAAAT′] |
| 4421 | NM_033056.3(PCDH15): | 65217 | PCDH15 | [′TTATTTGTTTGTTTGTTTTGTCACTRGCACG |
| | c.1998 − 2A > G | | | GGGATTCTAACCTTAGGGAA′] |
| 4422 | NM_138691.2(TMC1): | 117531 | TMC1 | [′ATCTTCAACCAAGGCATGATCTGGTRGGCC |
| | c.1763 + 3A > G | | | AGCTGTTGGACAGCTTATCAC′] |
| 4423 | NM_206933.2(USH2A): | 7399 | USH2A | [′CAACTTAACCTGTTAATTTTCTTACRGGGA |
| | c.12067 − 2A > G | | | ACAAGCCATCAAGCCCACCTG′] |
| 4424 | NM_206933.2(USH2A): | 7399 | USH2A | [′CCCGTCACTGAAGATGTTGTATGTCYACAG |
| | c.12295 − 2A > G | | | AAGGACAGAAGCAAAAGGGAT′] |
| 4425 | NM_206933.2(USH2A): | 7399 | USH2A | [′ATAATGCATAACCTTTCCCTGATGCRGGAA |
| | c.1841 − 2A > G | | | GGAACTGTGAGCTGTGCAAGG′] |
| 4426 | NM_206933.2(USH2A): | 7399 | USH2A | [′GATGTTCCTGCTTGTCTTTTGCTTTRGATAT |
| | c.8559 − 2A > G | | | GAGCTTCTGAGACGTAAAAT′] |
| 4427 | NM_032415.5(CARD11): | 84433 | CARD11 | [′GGCCTCACGCACTTCCTGATGAACGRGGTC |
| | c.401A > G (p.Glu134Gly) | | | ATCAAGCTGCAGCAGCAGATG′] |
| 4428 | NM_000548.3(TSC2): | 7249 | TSC2 | [′CACCGCTGTCCCCTCTGCTGGTGACRGCAC |
| | c.226 − 2A > G | | | GCAGTGGAAGCACTCTGGAAG′] |
| 4429 | NM_000548.3(TSC2): | 7249 | TSC2 | [′TCATTGGCCTCCCTTGTGCCTGTGCRGGAG |
| | c.1444 − 2A > G | | | GAGCTGATTAACTCAGTGGTC′] |
| 4430 | NM_000548.3(TSC2): | 7249 | TSC2 | [′CCCTGACCACCCTCTCCATTACCGCDGCTC |
| | c.2546 − 2A > G | | | TGGCCAGGCTGCCGCACCTCT′] |
| 4431 | NM_130466.3(UBE3B): | 89910 | UBE3B | [′TTTGTTCTCACTGTTTTCTTTCTTTRGGTGA |
| | c.545 − 2A > G | | | AAGTCTTCGACCAGCGATGA′] |
| 4432 | NM_005430.3(WNT1): | 7471 | WNT1 | [′CAACAACGAGGCAGGCCGTACGGTGRGCT |
| | c.624 + 4A > G | | | TTGAGAGGCTCCGCACCCTAAG′] |
| 4433 | NM_001893.4(CSNK1D): | 1453 | CSNK1D | [′AAGCTTGAATGTGTCAAAACCAAACRCCC |
| | c.137A > G (p.His46Arg) | | | TCAGCTCCACATTGAGAGCAAA′] |
| 4434 | NM_018972.2(GDAP1): c.368A > G | 54332 | GDAP1 | [′AGCATGTATTACCCACGGGTACAACRTTAC |
| | (p.His123Arg) | | | CGAGAGCTGCTTGACTCCTTG′] |
| 4435 | NM_032237.4(POMK): c.773A > G | 84197 | POMK | [′CATGGGGATTTCGTGGCTCCAGAGCRACT |
| | (p.Gln258Arg) | | | GTGGCCCTATGGAGAGGACGTG′] |
| 4436 | NM_201647.2(STAMBP): | 10617 | STAMBP | [′CGTCGGTACTTCCGCTCTGGAGTTGRGATT |
| | c.125A > G (p.Glu42Gly) | | | ATCCGAATGGCATCCATTTAC′] |
| 4437 | NM_001946.3(DUSP6): c.566A > G | 1848 | DUSP6 | [′ACTACCATCCGAGTCTGTTGCACTAYTGGG |
| | (p.Asn189Ser) | | | GTCTCGGTCAAGGTCAGACTC′] |
| 4438 | NM_003867.3(FGF17): c.560A > G | 8822 | FGF17 | [′TACCAAGGCCAGCTGCCCTTCCCCARCCAC |
| | (p.Asn187Ser) | | | GCCGAGAAGCAGAAGCAGTTC′] |
| 4439 | NM_013281.3(FLRT3): | −1 | — | [′GGGCTCATGTGCCAAGCCCCAGAAARGGT |
| | c.1016A > G (p.Lys339Arg) | | | TCGTGGGATGGCTATTAAGGAT′] |
| 4440 | NM_015560.2(OPA1): c.1146A > G | 4976 | OPA1 | [′TTTTTATTTTTCCTGAGTAGACCATRTCCTT |
| | (p.Ile382Met) | | | AAATGTAAAAGGCCCTGGAC′] |
| 4441 | NM_030964.3(SPRY4): c.530A > G | 81848 | SPRY4 | [′CCGGCGGTCCCACCCGAGCTGGACARGCA |
| | (p.Lys177Arg) | | | CTTCTTGCTGTGCGAGGCCTGT′] |
| 4442 | NM_002972.3(SBF1): c.1249A > G | 6305 | SBF1 | [′AAGGCCATGCCCTCCAGCACCTTCAYCAG |
| | (p.Met417Val) | | | GAAATCGTCCTCTACCAGCCCA′] |
| 4443 | NM_002972.3(SBF1): c.4768A > G | 6305 | SBF1 | [′TACATGTAATTGTGGAACACAGGCGYCCT |
| | (p.Thr1590Ala) | | | CTTGCTCAGCCGGTCCACATAC′] |
| 4444 | NM_006876.2(B4GAT1): | 11041 | B4GAT1 | [′GTTCCATCCCCAAAAGGAGGCTGAARATC |
| | c.1168A > G (p.Asn390Asp) | | | AGCACAATAAGATCCTATATCG′] |
| 4445 | NM_000059.3(BRCA2): | 675 | BRCA2 | [′AAAATAAACTATTTTCTTTCCTCCCVGGGT |
| | c.517 − 2A > G | | | CGTCAGACACCAAAACATATT′] |
| 4446 | NM_000059.3(BRCA2): | 675 | BRCA2 | [′ATGTAATATAAAATAATTGTTTCCTRGGCA |
| | c.6938 − 2A > G | | | CAATAAAAGATCGAAGATTGT′] |
| 4447 | NM_000059.3(BRCA2): | 675 | BRCA2 | [′AACTTATATATTTTCTCCCCATTGCDGCAC |
| | 2c.7008 − A > G | | | AACTAAGGAACGTCAAGAGAT′] |
| 4448 | NM_000059.3(BRCA2): | 675 | BRCA2 | [′GATAATATTCTACTTTTATTTGTTCRGGGC |
| | c.7806 − 2A > G | | | TCTGTGTGACACTCCAGGTGT′] |
| 4449 | NM_000059.3(BRCA2): | 675 | BRCA2 | [′AGCAGACCCAGCTTACCTTGAGGTGRGAG |
| | c.8754 + 4A > G | | | AGTAAGAGGACATATAATGAGG′] |
| 4450 | NM_000059.3(BRCA2): | 675 | BRCA2 | [′GTTGAATTTTTGTTTTGTTTTCTGTRGGTTT |
| | c.9118 − 2A > G | | | CAGATGAAATTTTATTTCAG′] |
| 4451 | NM_000059.3(BRCA2): | 675 | BRCA2 | [′TAGGCTACGTTTTCATTTTTTTATCRGATGT |
| | c.9649 − 2A > G | | | CTTCTCCTAATTGTGAGATA′] |
| | NM_000218.2(KCNQ1): | 3784 | KCNQ1 | [] |
| | c.1070A > G (p.Gln357Arg) | | | |
| 4452 | NM_000218.2(KCNQ1): | 3784 | KCNQ1 | [′AAGGTGCAGCAGAAGCAGAGGCAGARGC |
| | Gc.1085A > (p.Lys362Arg) | | | ACTTCAACCGGCAGATCCCGGCG′] |
| 4453 | NM_000218.2(KCNQ1): | 3784 | KCNQ1 | [′TCGACGCATGCAGTACTTTGTGGCCVAGA |
| | c.1576A > G (p.Lys526Glu) | | | AGAAATTCCAGGTAAGCCCTGT′] |
| | NM_000218.2(KCNQ1): | 3784 | KCNQ1 | |
| | c.1756A > G (p.Asn586Asp) | | | |
| 4454 | NM_000218.2(KCNQ1): c.332A > G | 3784 | KCNQ1 | [′CGCACCCACGTCCAGGGCCGCGTCTRCAA |
| | (p.Tyr111Cys) | | | CTTCCTCGAGCGTCCCACCGGC′] |
| | NM_000218.2(KCNQ1): c.344A > G | 3784 | KCNQ1 | [] |
| | (p.Glu115Gly) | | | |
| 4455 | NM_000218.2(KCNQ1): c.773A > G | 3784 | KCNQ1 | [′CTCCTGGGCTCCGTGGTCTTCATCCVCCGC |
| | (p.His258Arg) | | | CAGGTGGGTGGCCCGGGTTAG′] |
| 4456 | NM_000218.2(KCNQ1): c.944A > G | 3784 | KCNQ1 | [′CAGGTCACAGTCACCACCATCGGCTNTGG |
| | (p.Tyr315Cys) | | | GGACAAGGTGCCCCAGACGTGG′] |
| | NM_000218.2(KCNQ1): c.964A > G | 3784 | KCNQ1 | = |
| | (p.Thr322Ala) | | | |
| 4457 | NM_000492.3(CFTR): | 1080 | CFTR | [′CCTAATAATGATGGGTTTTATTTCCRGACT |
| | c.1393 − 2A > G | | | TCACTTCTAATGGTGATTATG′] |
| 4458 | NM_000492.3(CFTR): | 1080 | CFTR | [′ACAGAAAAAGAAATATTTGAAAGGTVTGT |
| | c.1766 + 3A > G | | | TCTTTGAATACCTTACTTATAA′] |
| 4459 | NM_000492.3(CFTR): c.1A > G | 1080 | CFTR | [′CAGGGACCCCAGCGCCCGAGAGACCRTGC |
| | (p.Met1Val) | | | AGAGGTCGCCTCTGGAAAAGGC′] |
| 4460 | NM_000492.3(CFTR): | 1080 | CFTR | [′ACCAACATGTTTTCTTTGATCTTACDGTTG |
| | c.2989 − 2A > G | | | TTATTAATTGTGATTGGAGCT′] |
| 4461 | NM_000492.3(CFTR): | 1080 | CFTR | [′ACAACCTGAACAAATTTGATGAAGTNTGT |
| | c.579 + 3A > G | | | ACCTATTGATTTAATCTTTTAG′] |
| 4462 | NM_007294.3(BRCA1): c.122A > G | 672 | BRCA1 | [′GAACCTGTCTCCACAAAGTGTGACCRCAT |
| | (p.His41Arg) | | | ATTTTGCAAGTAAGTTTGAATG′] |
| 4463 | NM_007294.3(BRCA1): c.1A > G | 672 | BRCA1 | [′TTAAAGTTCATTGGAACAGAAAGAARTGG |
| | (p.Met1Val) | | | ATTTATCTGCTCTTCGCGTTGA′] |
| 4464 | NM_007294.3(BRCA1): | 672 | BRCA1 | [′TGTAAGAATGATATAACCAAAAGGTRTAT |
| | c.212 + 3A > G | | | AATTTGGTAATGATGCTAGGTT′] |
| 4465 | NM_007294.3(BRCA1): | 672 | BRCA1 | [′TCTGAACCTCTGTTTTTGTTATTTAVGGTG |
| | c.4097 − 2A > G | | | AAGCAGCATCTGGGTGTGAGA′] |
| 4466 | NM_007294.3(BRCA1): | 672 | BRCA1 | [′GTTTTCTCCTTCCATTTATCTTTCTRGGTCA |
| | c.4485 − 2A > G | | | TCCCCTTCTAAATGCCCATC′] |
| 4467 | NM_007294.3(BRCA1): | 672 | BRCA1 | [′ATAATGGAATATTTGATTTAATTTCRGATG |
| | c.4987 − 2A > G | | | CTCGTGTACAAGTTTGCCAGA′] |
| 4468 | NM_007294.3(BRCA1): | 672 | BRCA1 | [′AACTAATCTAATTACTGAAGAGACTRCTCA |
| | c.5053A > G (p.Thr1685Ala) | | | TGTTGTTATGAAAACAGGTAT′] |
| 4469 | NM_007294.3(BRCA1): | 672 | BRCA1 | [′AATGCTCTTTCCTTCCTGGGGATCCDGGGT |
| | c.5407 − 2A > G | | | GTCCACCCAATTGTGGTTGTG′] |
| 4470 | NM_000540.2(RYR1): c.97A > G | 6261 | RYR1 | [′CGCTACCGTGCTCAAGGAGCAGCTCRAGC |
| | (p.Lys33Glu) | | | TCTGCCTGGCCGCCGAGGGCTT′] |
| 4471 | NM_015250.3(BICD2): | 23299 | BICD2 | [′CGGCAGCTGGCGGCTGCTGAGGACGRGAA |
| | c.2321A > G (p.Glu774Gly) | | | GAAGACGCTGAACTCGCTGCTG′] |
| 4472 | NM_006012.2(CLPP): | 8192 | CLPP | [′CATCGTGTGCGTCATGGGCCCGGTGRGCG |
| | c.270 + 4A > G | | | CCCCGCGCCGGGACCCTCCCCA′] |
| 4473 | NM_004656.3(BAP1): c.277A > G | 8314 | BAP1 | [′AGGAGCACGCTCAGCAAGGCATGAGHTGC |
| | (p.Thr93Ala) | | | ACAAGAGTTGGGTATCAGCTGT′] |
| 4474 | NM_004315.4(ASAH1): | 427 | ASAH1 | [′AGGAATCATTGGATGTATATGAGTARGTA |
| | c.965 + 4A > G | | | GGTTTGTTAAAGCAAAAGAAGT′] |
| 4475 | NM_000100.3(CSTB): | 1476 | CSTB | [′GCTTCGCTCACTCCGCTCTCTTCCCRGGTG |
| | c.169 − 2A > G | | | CACGTCGGCGACGAGGACTTC′] |
| 4476 | NM_015268.3(DNAJC13): | 23317 | DNAJC13 | [′TTAAAATCTAGGTATGAATTTTTCARTGAG |
| | c.2564A > G (p.Asn855Ser) | | | CTTTATCATCGCTTCTTGCTC′] |
| 4477 | NM_001003722.1(GLE1): | 2733 | GLE1 | [′CTTAAAAAAAAAAAAAAAAAAAAAARCCT |
| | c.433 − 10A > G | | | TTTCAGGAGGGCCTGAGGCTAT′] |
| 4478 | NM_001142519.1(FAM111A): | 63901 | FAM111A | [′TTCCAGAAAATAGTTCACAACCCTGDTGTG |
| | c.1583A > G (p.Asp528Gly) | | | ATTACCTATGACACTGAATTT′] |
| 4479 | NM_001142519.1(FAM111A): | 63901 | FAM111A | [′GCATAGAACAACGTTTGGGAAAGTARCAA |
| | c.1012A > G (p.Thr338Ala) | | | AAAATTCTTCTTCGATTAAAGT′] |
| 4480 | NM_001927.3(DES): | 1674 | DES | [′CTGAGTGTGCGATGGACCCTGTTACRGAA |
| | c.1289 − 2A > G | | | ACCAGCCCTGAGCAAAGGGGTT′] |
| 4481 | NM_014795.3(ZEB2): c.3134A > G | 9839 | ZEB2 | [′AAACACAAGCACCACCTTATCGAGCRCTC |
| | (p.His1045Arg) | | | AAGGCTTCACTCGGGCGAGAAG′] |
| 4482 | NM_002163.2(IRF8): c.322A > G | 3394 | IRF8 | [′CCAACTGGACATTTCCGAGCCATACRAAG |
| | (p.Lys108Glu) | | | TTTACCGAATTGTTCCTGAGGA′] |
| 4483 | NM_002163.2(IRF8): c.238A > G | 3394 | IRF8 | [′CAAAGCTGAACCAGCCACTTGGAAGRCGA |
| | (p.Thr80Ala) | | | GGTTACGCTGTGCTTTGAATAA′] |
| 4484 | NM_001287.5(CLCN7): c.296A > G | 1186 | CLCN7 | [′TGTCCCGGCCTGCAGAGCTTGGACTRTGAC |
| | (p.Tyr99Cys) | | | AACAGTGAGAACCAGCTGTTC′] |
| 4485 | NM_001127217.2(SMAD9): | 4093 | SMAD9 | [′AGAGAAGGCAGTGGACTCTCTAGTGRAGA |
| | c.127A > G (p.Lys43Glu) | | | AGTTAAAGAAGAAGAAGGGAGC′] |
| 4486 | NM_002246.2(KCNK3): c.575A > G | 3777 | KCNK3 | [′TGGACCTTCTTCCAGGCCTACTACTRCTGC |
| | (p.Tyr192Cys) | | | TTCATCACCCTCACCACCATC′] |
| 4487 | NM_080605.3(B3GALT6): c.1A > G | 126792 | B3GALT6 | [′CGCCACGCCCGCCGCAGCAGCTTCAYGGC |
| | (p.Met1Val) | | | GCCCGCGCCGGGCCGGCGGCCC′] |
| 4488 | NM_080605.3(B3GALT6): | 126792 | B3GALT6 | [′CGGCGCTCGGCGGCGCGGGGCGCGCYGGC |
| | c.193A > G (p.Ser65Gly) | | | CACCAGCACTGCCAGGAAGGCG′] |
| 4489 | NM_000388.3(CASR): c.85A > G | 846 | CASR | [′CGGGCCAGACCAGCGAGCCCAAAAGRAGG |
| | (p.Lys29Glu) | | | GGGACATTATCCTTGGGGGGCT′] |
| 4490 | NM_003793.3(CTSF): c.962A > G | 8722 | CTSF | [′GGGACCCTGCTCTCCCTCTCTGAACRGGGT |
| | (p.Gln321Arg) | | | GAGCATCTCGCTCTACTCCTC′] |
| 4491 | NM_003793.3(CTSF): c.692A > G | 8722 | CTSF | [′GAGATCACTGAACTTGGTGACTCCAYACT |
| | (p.Tyr231Cys) | | | GAGCTGTGCCACGGTCCAGGGC′] |
| 4492 | NM_022114.3(PRDM16): | 63976 | PRDM16 | [′GGCAGCCGGGCCCGTGCCAGCCAAARCGG |
| | c.2447A > G (p.Asn816Ser) | | | CGGCGGGCGGGAGCCCCGCAAG′] |
| 4493 | NM_173551.4(ANKS6): | 203286 | ANKS6 | [′GGGCAGCACTGGGATGCTCCAGGGCYGTC |
| | c.1322A > G (p.Gln441Arg) | | | GGACCTTCGAGTGGGGCAGGGG′] |
| 4494 | NM_005689.2(ABCB6): c.508A > G | 10058 | ABCB6 | [′GAACTTGGCCCTGGTGTCTTGGAACRGCCC |
| | (p.Ser170Gly) | | | ACAGTGGTGGTGGGCAAGGGC′] |
| 4495 | NM_001070.4(TUBG1): c.275A > G | 7283 | TUBG1 | [′AAGCTCTACAACCCAGAGAACATCTRCCT |
| | (p.Tyr92Cys) | | | GTCGGAACATGGAGGAGGAGCT′] |
| 4496 | NM_001613.2(ACTA2): c.145A > G | 59 | ACTA2 | [′ACCTTTTTAGGGGGTGATGGTGGGARTGG |
| | (p.Met49Val) | | | GACAAAAAGACAGCTACGTGGG′] |
| 4497 | NM_031157.2(HNRNPA1): | 3178 | HNRNPA1 | [′AGCTACAATGATTTTGGGAATTACARCAAT |
| | c.956A > G (p.Asn319Ser) | | | CAGTCTTCAAATTTTGGACCC′] |
| 4498 | NM_020117.9(LARS): c.1118A > G | 51520 | LARS | [′CTTAATAGTTAGCATTGGGAGAACAYAGA |
| | (p.Tyr373Cys) | | | TCACCTTGTATGATGTTAAAGG′] |
| 4499 | NM_001651.3(AQP5): c.367A > G | 362 | AQP5 | [′CTAACCCGCTATCCCCTTGCAGCTCRACAA |
| | (p.Asn123Asp) | | | CAACACAACGCAGGGCCAGGC′] |
| 4500 | m.13637A > G | 4540 | MT-ND5 | [′ATAATTCTTCTCACCCTAACAGGTCRACCT |
| | | | | CGCTTCCCCACCCTTACTAAC′] |
| 4501 | NM_000081.3(LYST): | 1130 | LYST | [′GGGAAGGCTTCTGTTCAAGCGATCARTGTT |
| | c.10127A > G (p.Asn3376Ser) | | | TTTCATCCTGCTGTAAGTGAC′] |
| 4502 | NM_000142.4(FGFR3): | 2261 | FGFR3 | [′CCAGCAGTGGGGGCTCGCGGACGTGNAGG |
| | c.2421A > G p.Ter807Trp) | | | GCCACTGGTCCCCAACAATGTG′] |
| 4503 | NM_000207.2(INS): c.*59A > G | −1 | — | [′TCCTGCACCGAGAGAGATGGAATAARGCC |
| | | | | CTTGAACCAGCCCTGCTGTGCC′] |
| 4504 | NM_000370.3(TTPA): c.191A > G | 7274 | TTPA | [′CTGCGCGCCCGGGATTTCGATCTGGRCCTG |
| | (p.Asp64Gly) | | | GCCTGGCGGGTAAGCGTGCGT′] |
| 4505 | NM_001006657.1(WDR35): | 57539 | WDR35 | [′AAACCTTTACGTGTCAAGAAGCTCTRTGTA |
| | c.2912A > G (p.Tyr971Cys) | | | CTGTCAGCCTTACTTATAGAG′] |
| 4506 | NM_004595.4(SMS): c.443A > G | 6611 | SMS | [′GTATATGACGAAGATTCACCTTATCRAAAT |
| | (p.Gln148Arg) | | | ATAAAAATTCTACACTCGAAG′] |
| 4507 | NM_005259.2(MSTN): c.458A > G | −1 | — | [′AAAATACAATACAATAAAGTAGTAARGGC |
| | (p.Lys153Arg) | | | CCAACTATGGATATATTTGAGA′] |
| 4508 | NM_000784.3(CYP27A1): | 1593 | CYP27A1 | [′TGGGCCCTGTACCACCTCTCAAAGGRCCCT |
| | c.1061A > G (p.Asp354Gly) | | | GAGATCCAGGAGGCCTTGCAC′] |
| 4509 | NM_000784.3(CYP27A1): | 1593 | CYP27A1 | [′TCACTCTATGCCACCTTCCTCCCCARGTGG |
| | c.776A > G (p.Lys259Arg) | | | ACTCGCCCCGTGCTGCCTTTC′] |
| 4510 | NM_000540.2(RYR1): | 6261 | RYR1 | [′ATCCCAACTATCGGGCGGCTGCGCARGAG |
| | c.10100A > G (p.Lys3367Arg) | | | GGCAGGGAAGGTGGTGTCCGAG′] |
| 4511 | NM_000540.2(RYR1): | 6261 | RYR1 | [′CTACCTGTACACCGTGGTGGCCTTCRACTT |
| | c.14572A > G (p.Asn4858Asp) | | | CTTCCGCAAGTTCTACAACAA′] |
| 4512 | NM_000540.2(RYR1): | 6261 | RYR1 | [′CGCGGGTGACGAATACGAGCTCTACRGGG |
| | c.14740A > G (p.Arg4914Gly) | | | TGGTCTTCGACATCACCTTCTT′] |
| 4513 | NM_000540.2(RYR1): | 6261 | RYR1 | [′GCCTTCAACTTCTTCCGCAAGTTCTRCAAC |
| | c.14591A > G (p.Tyr4864Cys) | | | AAGAGCGAGGATGAGGATGAA′] |
| 4514 | NM_002336.2(LRP6): c.1298A > G | 4040 | LRP6 | [′GATCGAATAGAAGTGACAAGGCTCARTGG |
| | (p.Asn433Ser) | | | GACCATGAGGAAGATCTTGATT′] |
| 4515 | NM_001257235.1(ALG13): | 79868 | ALG13 | [′GTTATAAACGAAAAGTTGATGAACARTCA |
| | c.8A > G (p.Asn3Ser) | | | TCAGCTGGAACTGGCAAAGCAG′] |
| 4516 | NM_001015879.1(AURKC): | 6795 | AURKC | [′CAGGGTGACTTTTCTTTGCACCCACRGATA |
| | c.379 − 2A > G | | | ATAGAGGAGTTGGCAGATGCC′] |
| 4517 | NM_012160.4(FBXL4): | 26235 | FBXL4 | [′AATTGTACCAGGTTACAGCAGCTGGRCAT |
| | c.1694A > G (p.Asp565Gly) | | | ATTAGGTAAGGTTACAATATAT′] |
| 4518 | NM_020988.2(GNAO1): c.521A > G | 2775 | GNA01 | [′GCCGACTACCAGCCCACCGAGCAGGRCAT |
| | (p.Asp174Gly) | | | CCTCCGAACCAGGGTCAAAACC′] |
| 4519 | NM_001927.3(DES): c.1024A > G | 1674 | DES | [′GACCTGGGTTCCCCCTCTCCTGCAGRACGA |
| | (p.Asn342Asp) | | | TTCCCTGATGAGGCAGATGCG′] |
| 4520 | NM_001927.3(DES): c.1333A > G | 1674 | DES | [′GGGTTCTGAGGTCCATACCAAGAAGRCGG |
| | (p.Thr445Ala) | | | TGATGATCAAGACCATCGAGAC′] |
| 4521 | NM_001927.3(DES): | 1674 | DES | [′TCCTTAAGAAAGTGCATGAAGAGGTRTAC |
| | c.735 + 3A > G | | | CTTGGCCCCTCTTCCTGGGGTC′] |
| 4522 | NM_002055.4(GFAP): c.1097A > G | 2670 | GFAP | [′GCCCTGGACATCGAGATCGCCACCTRCAG |
| | (p.Tyr366Cys) | | | GAAGCTGCTAGAGGGCGAGGAG′] |
| 4523 | NM_002055.4(GFAP): c.1112A > G | 2670 | GFAP | [′ATCGCCACCTACAGGAAGCTGCTAGDGGG |
| | (p.Glu371Gly) | | | CGAGGAGAACCGGTGAGCCCTC′] |
| 4524 | NM_002055.4(GFAP): c.1121A > G | 2670 | GFAP | [′TACAGGAAGCTGCTAGAGGGCGAGGRGAA |
| | (p.Glu374Gly) | | | CCGGTGAGCCCTCATCACAGCC′] |
| 4525 | NM_002055.4(GFAP): c.230A > G | 2670 | GFAP | [′GAGCGGGCAGAGATGATGGAGCTCARTGA |
| | (p.Asn77Ser) | | | CCGCTTTGCCAGCTACATCGAG′] |
| 4526 | NM_002055.4(GFAP): c.770A > G | 2670 | GFAP | [′AACATGCATGAAGCCGAAGAGTGGTRCCG |
| | (p.Tyr257Cys) | | | CTCCAAGGTAGCCCTGCCTGTG′] |
| 4527 | NM_002055.4(GFAP): c.835A > G | 2670 | GFAP | [′CAACGCGGAGCTGCTCCGCCAGGCCRAGC |
| | (p.Lys279Glu) | | | ACGAAGCCAACGACTACCGGCG′] |
| 4528 | NM_005554.3(KRT6A): c.511A > G | 3853 | KRT6A | [′GGAGCGTGAACAGATCAAGACCCTCDACA |
| | (p.Asn171Asp) | | | ACAAGTTTGCCTCCTTCATCGA′] |
| 4529 | NM_005554.3(KRT6A): c.512A > G | 3853 | KRT6A | [′GAGCGTGAACAGATCAAGACCCTCAVCAA |
| | (p.Asn171Ser) | | | CAAGTTTGCCTCCTTCATCGAC′] |
| 4530 | NM_005557.3(KRT16): c.373A > G | 3868 | KRT16 | [′TGAGAAGGTGACCATGCAGAACCTCRATG |
| | (p.Asn125Asp) | | | ACCGCCTGGCCTCCTACCTGGA′] |
| 4531 | NM_170707.3(LMNA): | 4000 | LMNA | [′TTTTGGTTTCTGTGTCCTTCCTCCAVCCCTT |
| | c.640 − 10A > G | | | CCAGGAGCTGCGTGAGACCA′] |
| | NM_000218.2(KCNQ1): c.1061A > | 3784 | KCNQ1 | [] |
| | G (p.Lys354Arg) | | | |
| | NM_000218.2(KCNQ1): c.1138A > | 3784 | KCNQ1 | [] |
| | G (p.Arg380Gly) | | | |
| | NM_000218.2(KCNQ1): c.1193A > | 3784 | KCNQ1 | [] |
| | G (p.Lys398Arg) | | | |
| | NM_000218.2(KCNQ1): c.1640A > | 3784 | KCNQ1 | [] |
| | G (p.Gln547Arg) | | | |
| | NM_000218.2(KCNQ1): c.1669A > | 3784 | KCNQ1 | [] |
| | G (p.Lys557Glu) | | | |
| | NM_000218.2(KCNQ1): c.1705A > | 3784 | KCNQ1 | [] |
| | G (p.Lys569Glu) | | | |
| | NM_000218.2(KCNQ1): c.1793A > | 3784 | KCNQ1 | [] |
| | G (p.Lys598Arg) | | | |
| | NM_000218.2(KCNQ1): c.430A > G | 3784 | KCNQ1 | [] |
| | (p.Thr144Ala) | | | |
| | NM_000218.2(KCNQ1): c.440A > G | 3784 | KCNQ1 | [] |
| | (p.Gln147Arg) | | | |
| | NM_000218.2(KCNQ1): c.548A > G | 3784 | KCNQ1 | [] |
| | (p.Lys183Arg) | | | |
| 4532 | NM_000218.2(KCNQ1): c.592A > G | 3784 | KCNQ1 | [′GCGGCTGCGCTTTGCCCGGAAGCCCRTTTC |
| | (p.Ile198Val) | | | CATCATCGGTGAGTCATGCCT′] |
| 4533 | NM_000218.2(KCNQ1): c.652A > G | 3784 | KCNQ1 | [′CATGGTGGTCCTCTGCGTGGGCTCCRAGGG |
| | (p.Lys218Glu) | | | GCAGGTGTTTGCCACGTCGGC′] |
| 4534 | NM_000218.2(KCNQ1): c.820A > G | 3784 | KCNQ1 | [′CCTGTACATCGGCTTCCTGGGCCTCRTCTT |
| | (p.Ile274Val) | | | CTCCTCGTACTTTGTGTACCT′] |
| | NM_000218.2(KCNQ1): c.842A > G | 3784 | KCNQ1 | [] |
| | (p.Tyr281Cys) | | | |
| | NM_000218.2(KCNQ1): c.931A > G | 3784 | KCNQ1 | [] |
| | (p.Thr311Ala) | | | |
| | NM_000218.2(KCNQ1): c.950A > G | 3784 | KCNQ1 | [] |
| | (p.Asp317Gly) | | | |
| | NM_000238.3(KCNH2): c.1205A > | 3757 | KCNH2 | [] |
| | G (p.His402Arg) | | | |
| | NM_000238.3(KCNH2): c.1259A > | 3757 | KCNH2 | [] |
| | G (p.Tyr420Cys) | | | |
| 4535 | NM_000238.3(KCNH2): c.1280A > | 3757 | KCNH2 | [′ATCTACACGGCTGTCTTCACACCCTVCTCG |
| | G (p.Tyr427Cys) | | | GCTGCCTTCCTGCTGAAGGAG′] |
| | NM_000238.3(KCNH2): c.128A > G | 3757 | KCNH2 | [] |
| | (p.Tyr43Cys) | | | |
| | NM_000238.3(KCNH2): c.1424A > | 3757 | KCNH2 | [] |
| | G (p.Tyr475Cys) | | | |
| 4536 | NM_000238.3(KCNH2): c.1478A > | 3757 | KCNH2 | [′CACCCCGGCCGCATCGCCGTCCACTNCTTC |
| | G (p.Tyr493Cys) | | | AAGGGCTGGTTCCTCATCGAC′] |
| | NM_000238.3(KCNH2): c.1502A > | 3757 | KCNH2 | [] |
| | G (p.Asp501Gly) | | | |
| 4537 | NM_000238.3(KCNH2): c.1685A > | 3757 | KCNH2 | [′ATGTGCACCTTTGCGCTCATCGCGCVCTGG |
| | G (p.His562Arg) | | | CTAGCCTGCATCTGGTACGCC′] |
| 4538 | NM_000238.3(KCNH2): c.1711A > | 3757 | KCNH2 | [′CTGGCTAGCCTGCATCTGGTACGCCVTCGG |
| | G (p.Ile571Val) | | | CAACATGGAGCAGCCACACAT′] |
| 4539 | NM_000238.3(KCNH2): c.1720A > | 3757 | KCNH2 | [′CTGCATCTGGTACGCCATCGGCAACVTGG |
| | G (p.Met574Val) | | | AGCAGCCACACATGGACTCACG′] |
| | NM_000238.3(KCNH2): c.1724A > | 3757 | KCNH2 | [] |
| | G (p.Glu575Gly) | | | |
| 4540 | NM_000238.3(KCNH2): c.173A > G | 3757 | KCNH2 | [′GAGCTGTGCGGCTACTCGCGGGCCGVGGT |
| | (p.Glu58Gly) | | | GATGCAGCGACCCTGCACCTGC′] |
| | NM_000238.3(KCNH2): c.1747A > | 3757 | KCNH2 | [] |
| | G (p.Ile583Val) | | | |
| | NM_000238.3(KCNH2): c.1762A > | 3757 | KCNH2 | [] |
| | G (p.Asn588Asp) | | | |
| | NM_000238.3(KCNH2): c.1777A > | 3757 | KCNH2 | [] |
| | G (p.Ile593Val) | | | |
| | NM_000238.3(KCNH2): c.1783A > | 3757 | KCNH2 | [] |
| | G (p.Lys595Glu) | | | |
| | NM_000238.3(KCNH2): c.1790A > | 3757 | KCNH2 | [] |
| | G (p.Tyr597Cys) | | | |
| | NM_000238.3(KCNH2): c.1826A > | 3757 | KCNH2 | [] |
| | G (p.Asp609Gly) | | | |
| | NM_000238.3(KCNH2): c.1847A > | 3757 | KCNH2 | [] |
| | G (p.Tyr616Cys) | | | |
| | NM_000238.3(KCNH2): c.1885A > | 3757 | KCNH2 | [] |
| | G (p.Asn629Asp) | | | |
| 4541 | NM_000238.3(KCNH2): c.1886A > | 3757 | KCNH2 | [′AGCCTCACCAGTGTGGGCTTCGGCANCGT |
| | G (p.Asn629Ser) | | | CTCTCCCAACACCAACTCAGAG′] |
| | NM_000238.3(KCNH2): c.1897A > | 3757 | KCNH2 | [] |
| | G (p.Asn633Asp) | | | |
| 4542 | NM_000238.3(KCNH2): c.1898A > | 3757 | KCNH2 | [′GTGGGCTTCGGCAACGTCTCTCCCADCACC |
| | G (p.Asn633Ser) | | | AACTCAGAGAAGATCTTCTCC′] |
| | NM_000238.3(KCNH2): c.1903A > | 3757 | KCNH2 | [] |
| | G (p.Asn635Asp) | | | |
| | NM_000238.3(KCNH2): c.1910A > | 3757 | KCNH2 | [] |
| | G (p.Glu637Gly) | | | |
| | NM_000238.3(KCNH2): c.1912A > | 3757 | KCNH2 | [] |
| | G (p.Lys638Glu) | | | |
| 4543 | NM_000238.3(KCNH2): c.1933A > | 3757 | KCNH2 | [′AGAGAAGATCTTCTCCATCTGCGTCDTGCT |
| | G (p.Met645Val) | | | CATTGGCTGTGAGTGTGCCCA′] |
| | NM_000238.3(KCNH2): c.209A > G | 3757 | KCNH2 | [] |
| | (p.His70Arg) | | | |
| 4544 | NM_000238.3(KCNH2): c.2131A > | 3757 | KCNH2 | [′GCACGCCTGGTCCTACACCAACGGCRTCG |
| | G (p.Ile711Val) | | | ACATGAACGCGGTGAGGCCACC′] |
| | NM_000238.3(KCNH2): c.2266A > | 3757 | KCNH2 | [] |
| | G (p.Met756Val) | | | |
| | NM_000238.3(KCNH2): c.2510A > | 3757 | KCNH2 | [] |
| | G (p.Asp837Gly) | | | |
| | NM_000238.3(KCNH2): c.2591A > | 3757 | KCNH2 | [] |
| | G (p.Asp864Gly) | | | |
| | NM_000238.3(KCNH2): c.286A > G | 3757 | KCNH2 | [] |
| | (p.Ile96Val) | | | |
| 4545 | NM_000238.3(KCNH2): c.301A > G | 3757 | KCNH2 | [′CAAAGTGGAAATCGCCTTCTACCGGDAAG |
| | (p.Lys101Glu) | | | ATGGTAGGAGCGGGCCGGGGCG′] |
| 4546 | NM_000238.3(KCNH2): c.3118A > | 3757 | KCNH2 | [′TCGGCGGCCCCGGGGCGACGTGGAGRGCA |
| | G (p.Ser1040Gly) | | | GGCTGGATGCCCTCCAGCGCCA′] |
| | NM_000238.3(KCNH2): c.3233A > | 3757 | KCNH2 | [] |
| | G (p.Tyr1078Cys) | | | |
| | NM_000238.3(KCNH2): c.3343A > | 3757 | KCNH2 | [] |
| | G (p.Met1115Val) | | | |
| | NM_000238.3(KCNH2): c.652A > G | 3757 | KCNH2 | [] |
| | (p.Met218Val) | | | |
| | NM_000238.3(KCNH2): c.82A > G | 3757 | KCNH2 | [] |
| | (p.Lys28Glu) | | | |
| | NM_000891.2(KCNJ2): c.220A > G | 3759 | KCNJ2 | [] |
| | (p.Thr74Ala) | | | |
| | NM_000891.2(KCNJ2): c.223A > G | 3759 | KCNJ2 | [] |
| | (p.Thr75Ala) | | | |
| | NM_000891.2(KCNJ2): c.233A > G | 3759 | KCNJ2 | [] |
| | (p.Asp78Gly) | | | |
| | NM_000891.2(KCNJ2): c.574A > G | 3759 | KCNJ2 | [] |
| | (p.Thr192Ala) | | | |
| 4547 | NM_000891.2(KCNJ2): c.913A > G | 3759 | KCNJ2 | [′CATACTGGAAGGCATGGTGGAAGCCVCTG |
| | (p.Thr305Ala) | | | CCATGACGACACAGTGCCGTAG′] |
| | NM_172201.1(KCNE2): c.269A > G | 9992 | KCNE2 | [] |
| | (p.Glu90Gly) | | | |
| 4548 | NM_172201.1(KCNE2): c.281A > G | 9992 | KCNE2 | [′CAGTACATTGTAGAGGACTGGCAGGRAAA |
| | (p.Glu94Gly) | | | GTACAAGAGCCAAATCTTGAAT′] |
| | NM_000335.4(SCN5A): c.1217A > G | 6331 | SCN5A | [] |
| | (p.Asn406Ser) | | | |
| | NM_000335.4(SCN5A): c.1502A > G | 6331 | SCN5A | [] |
| | (p.Asp501Gly) | | | |
| | NM_000335.4(SCN5A): c.2249A > G | 6331 | SCN5A | [] |
| | (p.Gln750Arg) | | | |
| | NM_198056.2(SCN5A): c.2527A > G | 6331 | SCN5A | [] |
| | (p.Thr843Ala) | | | |
| | NM_000335.4(SCN5A): c.2780A > G | 6331 | SCN5A | [] |
| | (p.Asn927Ser) | | | |
| | NM_000335.4(SCN5A): c.3164A > G | 6331 | SCN5A | [] |
| | (p.Asp1055Gly) | | | |
| | NM_000335.4(SCN5A): c.343A > G | 6331 | SCN5A | [] |
| | (p.Ser115Gly) | | | |
| | NM_000335.4(SCN5A): c.3755A > G | 6331 | SCN5A | [] |
| | (p.Glu1252Gly) | | | |
| 4549 | NM_000335.4(SCN5A): c.376A > G | 6331 | SCN5A | [′AAAGGATATGAGTGAACCAGAATCTYCAC |
| | (p.Lys126Glu) | | | AGCCGCTCTCCGGATGGGGTGG′] |
| 4550 | NM_198056.2(SCN5A): c.4000A > G | 6331 | SCN5A | [′TGCCCTGGTGGGCGCCATCCCGTCCRTCAT |
| | (p.Ile1334Val) | | | GAACGTCCTCCTCGTCTGCCT′] |
| | NM_000335.4(SCN5A): c.4223A > G | 6331 | SCN5A | [] |
| | (p.Tyr1408Cys) | | | |
| | NM_000335.4(SCN5A): c.4252A > G | 6331 | SCN5A | [] |
| | (p.Lys1418Glu) | | | |
| | NM_000335.4(SCN5A): c.4291A > G | 6331 | SCN5A | [] |
| | (p.Arg1431Gly) | | | |
| | NM_198056.2(SCN5A): c.4346A > G | 6331 | SCN5A | [] |
| | (p.Tyr1449Cys) | | | |
| | NM_000335.4(SCN5A): c.4412A > G | 6331 | SCN5A | [] |
| | (p.Asn1471Ser) | | | |
| 4551 | NM_198056.2(SCN5A): c.4478A > G | 6331 | SCN5A | [′ATCTTCATGACAGAGGAGCAGAAGARGTA |
| | (p.Lys1493Arg) | | | CTACAATGCCATGAAGAAGCTG′] |
| | NM_000335.4(SCN5A): c.4489A > G | 6331 | SCN5A | [] |
| | (p.Met1497Val) | | | |
| | NM_000335.4(SCN5A): c.4577A > G | 6331 | SCN5A | [] |
| | (p.Lys1526Arg) | | | |
| 4552 | NM_198056.2(SCN5A): c.4978A > G | 6331 | SCN5A | [′GATGTCCCTGCCTGCCCTCTTCAACRTCGG |
| | (p.Ile1660Val) | | | GCTGCTGCTCTTCCTCGTCAT′] |
| | NM_000335.4(SCN5A): c.5138A > G | 6331 | SCN5A | [] |
| | (p.Asp1713Gly) | | | |
| | NM_000335.4(SCN5A): c.5161A > G | 6331 | SCN5A | [] |
| | (p.Asn1721Asp) | | | |
| | NM_000335.4(SCN5A): c.5297A > G | 6331 | SCN5A | [] |
| | (p.Tyr1766Cys) | | | |
| | NM_198056.2(SCN5A): c.5302A > G | 6331 | SCN5A | [] |
| | (p.Ile1768Val) | | | |
| | NM_000335.4(SCN5A): c.5317A > G | 6331 | SCN5A | [] |
| | (p.Asn1773Asp) | | | |
| | NM_000335.4(SCN5A): c.5318A > G | 6331 | SCN5A | [] |
| | (p.Asn1773Ser) | | | |
| | NM_000335.4(SCN5A): c.5366A > G | 6331 | SCN5A | [] |
| | (p.Asp1789Gly) | | | |
| | NM_000335.4(SCN5A): c.5402A > G | 6331 | SCN5A | [] |
| | (p.Asp1801Gly) | | | |
| | NM_000335.4(SCN5A): c.5513A > G | 6331 | SCN5A | [] |
| | (p.Asp1838Gly) | | | |
| | NM_198056.2(SCN5A): c.5726A > G | 6331 | SCN5A | [] |
| | (p.Gln1909Arg) | | | |
| 4553 | NM_000335.4(SCN5A): c.688A > G | 6331 | SCN5A | [′CCGAGTCCTCCGGGCCCTGAAAACTRTATC |
| | (p.Ile230Val) | | | AGTCATTTCAGGTGAAAATCA′] |
| | NM_000335.4(SCN5A): c.715A > G | 6331 | SCN5A | [] |
| | (p.Ile239Val) | | | |
| | NM_000335.4(SCN5A): c.89A > G | 6331 | SCN5A | [] |
| | (p.Glu30Gly) | | | |
| 4554 | NM_000383.3(AIRE): c.254A > G | 326 | AIRE | [′TTCTGGAGGGTGCTGTTCAAGGACTRCAAC |
| | (p.Tyr85Cys) | | | CTGGAGCGCTATGGCCGGCTG′] |
| 4555 | NM_006920.4(SCN1A): c.1876A > G | 6323 | SCN1A | [′ACGCAACAGCAACCTGAGTCAGACCRGTA |
| | (p.Ser626Gly) | | | GGTCATCCCGGATGCTGGCAGT′] |
| 4556 | NM_006920.4(SCN1A): c.4352A > G | −1 | — | [′GAAGAAAGTCTGTACATGTATCTTTRCTTT |
| | (p.Tyr1451Cys) | | | GTTATTTTCATCATCTTTGGG′] |
| 4557 | NM_000165.4(GJA1): c.617A > G | 2697 | GJA1 | [′TGTTTCCTCTCTCGCCCCACGGAGARAACC |
| | (p.Lys206Arg) | | | ATCTTCATCATCTTCATGCTG′] |
| 4558 | NM_000833.4(GRIN2A): | 2903 | GRIN2A | [′AGCTGTGTCTTTGTGTTTGTGCTGCRGGTG |
| | c.1123 − 2A > G | | | GGCAAGTGGGAGAACCATACG′] |
| 4559 | NC_000007.14: g.62535490A > G | −1 | — | [′GGAGAGTTTTGAGGCCTGTGGTTGARATG |
| | | | | GAAATATCTTCACAGAAAAACT′] |
| 4560 | NM_004595.4(SMS): c.983A > G | 6611 | SMS | [′AATCTGACAGAAGCACTGTCGCTCTVTGA |
| | (p.Tyr328Cys) | | | AGAACAGCTGGGGCGCCTGTAT′] |
| 4561 | NM_001256864.1(DNAJC6): | 9829 | DNAJC6 | [′CAAGAGAGTGCCAACCTTCTGTTTCRGATA |
| | c.801 − 2A > G | | | CCTGGGCTATATGTGTGACCT′] |
| 4562 | NM_001204316.1(PRLR): | 5618 | PRLR | [′GTCCAGGTTCGCTGCAAACCAGACCRTGG |
| | c.635A > G (p.His212Arg) | | | ATACTGGAGTGCATGGAGTCCA′] |
| 4563 | NM_012243.2(SLC35A3): | 23443 | SLC35A3 | [′TTGGCTTCAAGATTTTGTGCCAACCRGGTA |
| | c.886A > G (p.Ser296Gly) | | | AAATGTTCTTTTCTATTTTTT′] |
| 4564 | NM_000179.2(MSH6): | 2956 | MSH6 | [′AAAGACCTTTTCCTCCCTCATTCACRGGCT |
| | c.3439 − 2A > G | | | GGCTTATTAGCTGTAATGGCC′] |
| 4565 | NM_000249.3(MLH1): c.113A > G | 4292 | MLH1 | [′AATGCTATCAAAGAGATGATTGAGARCTG |
| | (p.Asn38Ser) | | | GTACGGAGGGAGTCGAGCCGGG′] |
| 4566 | NM_000249.3(MLH1): c.122A > G | 4292 | MLH1 | [′TTTTCTGTTTGATTTGCCAGTTTAGRTGCA |
| | (p.Asp41Gly) | | | AAATCCACAAGTATTCAAGTG′] |
| 4567 | NM_000249.3(MLH1): | 4292 | MLH1 | [′TTTTTGGTTTTATTTTTTGTTTTGCNGTTCT |
| | c.1559 − 2A > G | | | CCGGGAGATGTTGCATAACC′] |
| 4568 | NM_000249.3(MLH1): | 4292 | MLH1 | [′TTGAGGTATTGAATTTCTTTGGACCRGGTG |
| | c.1990 − 2A > G | | | AATTGGGACGAAGAAAAGGAA′] |
| 4569 | NM_000249.3(MLH1): | 4292 | MLH1 | [′TTTACTCATCTTTTTGGTATCTAACVGAAA |
| | c.208 − 2A > G | | | GAAGATCTGGATATTGTATGT′] |
| 4570 | NM_000249.3(MLH1): c.544A > G | 4292 | MLH1 | [′TGGGAAAATTTTGGAAGTTGTTGGCRGGT |
| | (p.Arg182Gly) | | | ACAGTCCAAAATCTGGGAGTGG′] |
| 4571 | NM_000249.3(MLH1): | 4292 | MLH1 | [′AAAATTTTGGAAGTTGTTGGCAGGTRCAGT |
| | c.545 + 3A > G | | | CCAAAATCTGGGAGTGGGTCT′] |
| 4572 | NM_000249.3(MLH1): | 4292 | MLH1 | [′TCTTACTCTTTTGTTTTTCTTTTCCVGGTAT |
| | c.546 − 2A > G | | | TCAGTACACAATGCAGGCAT′] |
| 4573 | NM_000249.3(MLH1): | 4292 | MLH1 | [′TTGTGTCTTCTGCTGTTTGTTTATCRGCAAG |
| | c.589 − 2A > G | | | GAGAGACAGTAGCTGATGTT′] |
| 4574 | NM_000249.3(MLH1): | 4292 | MLH1 | [′GATTTTTTTATATAGGTTATCGACABACCG |
| | c.677 + 3A > G | | | ACTAACAGCATTTCCAAAGAT′] |
| 4575 | NM_000249.3(MLH1): | 4292 | MLH1 | [′ACTGGTTGCTTTCTTTTTATTGTTTRGATCG |
| | c.791 − 2A > G | | | TCTGGTAGAATCAACTTCCT′] |
| 4576 | NM_000249.3(MLH1): c.883A > G | 4292 | MLH1 | [′AAACACACACCCATTCCTGTACCTCVGGTA |
| | (p.Ser295Gly) | | | ATGTAGCACCAAACTCCTCAA′] |
| 4577 | NM_000249.3(MLH1): | 4292 | MLH1 | [′CACACCCATTCCTGTACCTCAGGTARTGTA |
| | c.884 + 4A > G | | | GCACCAAACTCCTCAACCAAG′] |
| 4578 | NM_000251.2(MSH2): | 4436 | MSH2 | [′TTTGTTTGTTTTACTACTTTCTTTTVGGAAA |
| | 2c.1277 − A > G | | | ACACCAGAAATTATTGTTGG′] |
| 4579 | NM_000251.2(MSH2): | 4436 | MSH2 | [′CTTTTTCTTTTCTTCTTGATTATCARGGCTT |
| | c.1511 − 2A > G | | | GGACCCTGGCAAACAGATTA′] |
| 4580 | NM_000251.2(MSH2): c.1660A > G | 4436 | MSH2 | [′GAAGAATGGTGTTAAATTTACCAACNGGT |
| | (p.Ser554Gly) | | | TTGCAAGTCGTTATTATATTTT′] |
| 4581 | NM_000535.5(PMS2): c.1A > G | 5395 | PMS2 | [′CCGAGGCGGATCGGGTGTTGCATCCDTGG |
| | (p.Met1Val) | | | AGCGAGCTGAGAGCTCGAGGTG′] |
| 4582 | NM_000535.5(PMS2): | 5395 | PMS2 | [′ATAAATATGTTTTCTTTTTTGCCTTRGAATG |
| | c.989 − 2A > G | | | CGTTGATATCAATGTTACTC′] |
| 4583 | NM_000059.3(BRCA2): | 675 | BRCA2 | [′TAAGGGATTTGCTTTGTTTTATTTTRGTCCT |
| | c.426 − 2A > G | | | GTTGTTCTACAATGTACACA′] |
| 4584 | NM_024876.3(ADCK4): c.857A > G | 79934 | ADCK4 | [′CAGCAGGAGCTGGCTTGGGAGTGTGRCTA |
| | (p.Asp286Gly) | | | CCGTCGTGAGGCGGCTTGTGCC′] |
| 4585 | NM_006005.3(WFS1): c.1385A > G | 7466 | WFS1 | [′TACACGCGCAGGGCCCTGGCCACCGRGGT |
| | (p.Glu462Gly) | | | CACCGCCGGCCTGCTATCGCTG′] |
| 4586 | NM_000019.3(ACAT1): c.472A > G | 38 | ACAT1 | [′GGCAGGTGGGATGGAGAGCATGTCCRATG |
| | (p.Asn158Asp) | | | TTCCATATGTAATGAACAGAGG′] |
| 4587 | NM_000050.4(ASS1): | 445 | ASS1 | [′TCCACCTGTGCTGTCTCTTTCCTGCRGCAA |
| | c.496 − 2A > G | | | CACGGGATTCCCATCCCGGTC′] |
| 4588 | NM_000117.2(EMD): | 2010 | EMD | [′CCCACTTGCTCCCCTCTTTTGCCTCRGGGA |
| | c.450 − 2A > G | | | ACGCCCCATGTACGGCCGGGA′] |
| 4589 | NM_000153.3(GALC): c.334A > G | 2581 | GALC | [′GCATAATGCATGTGGGAGGGCTCAGBGCC |
| | (p.Thr112Ala) | | | GTCTGAATAGAGGAGAGCAAAA′] |
| 4590 | NM_000155.3(GALT): | 2592 | GALT | [′CCCCACTGTCTCTCTTCTTTCTGTCRGGGG |
| | c.905 − 2A > G | | | CTCCCACAGGATCAGAGGCTG′] |
| 4591 | NM_000159.3(GCDH): c.542A > G | 2639 | GCDH | [′CTCCTGGGCTGCTTCGGGCTCACAGRGCCC |
| | (p.Glu181Gly) | | | AACAGCGGAAGTGACCCCAGC′] |
| 4592 | NM_000169.2(GLA): c.509A > G | −1 | — | [′TGGGGAGTAGATCTGCTAAAATTTGRTGGT |
| | (p.Asp170Gly) | | | TGTTACTGTGACAGTTTGGAA′] |
| 4593 | NM_000169.2(GLA): | −1 | — | [′TATTTTACCCATTGTTTTCTCATACRGGTTA |
| | c.548 − 2A > G | | | TAAGCACATGTCCTTGGCCC′] |
| 4594 | NM_000169.2(GLA): c.647A > G | −1 | — | [′TCATATCTGTTTTCACAGCCCAATTRTACA |
| | (p.Tyr216Cys) | | | GAAATCCGACAGTACTGCAAT′] |
| 4595 | NM_000232.4(SGCB): c.1A > G | 6443 | SGCB | [′GCTCGGCGGCGGCGGGCGCGGGAAGRTGG |
| | (p.Met1Val) | | | CGGCAGCGGCGGCGGCGGCTGC′] |
| 4596 | NM_000255.3(MUT): | 4594 | MUT | [′TAAAATTTTTCTTTGGGAAATTACCRGGTT |
| | c.1445 − 2A > G | | | CTGAAGTAATTGTTGGAGTAA′] |
| 4597 | NM_000277.1(PAH): c.533A > G | 5053 | PAH | [′AGTGGGCAGCCCATCCCTCGAGTGGDATA |
| | (p.Glu178Gly) | | | CATGGAGGAAGAAAAGAAAACA′] |
| 4598 | NM_000277.1(PAH): c.974A > G | 5053 | PAH | [′CAGATTGACTTTCCATTCCAGATTTRCTGG |
| | (p.Tyr325Cys) | | | TTTACTGTGGAGTTTGGGCTC′] |
| 4599 | NM_000328.2(RPGR): | 6103 | RPGR | [′TGATTATTTCTTTTTCCCTCCTACCRGGAA |
| | c.155 − 2A > G | | | ATAATAAACTTTACATGTTTG′] |
| 4600 | NM_000350.2(ABCA4): | 24 | ABCA4 | [′ATTAACGTGGGTGTCTCATTGCCTCRGAGA |
| | c.4540 − 2A > G | | | ACACAGCGCAGCACGGAAATT′] |
| 4601 | NM_000350.2(ABCA4): | 24 | ABCA4 | [′TTCTCTCTTTTTGTTTTGTTTTTCCRGATTC |
| | c.67 − 2A > G | | | GCTTTGTGGTGGAACTCGTG′] |
| 4602 | NM_000487.5(ARSA): | 410 | ARSA | [′CCCCGTGACCCCTGACTCTGCCCCCRGAGC |
| | 2c.1108 − A > G | | | CCTCGGCAGTCTCTCTTCTTC′] |
| 4603 | NM_000489.4(ATRX): | 546 | ATRX | [′TAATGTTCTTTATTTCTTCTTTTTTRGATAA |
| | c.134 − 2A > G | | | AATCAGTGGTTCTGGAAGTA′] |
| 4604 | NM_000489.4(ATRX): c.536A > G | 546 | ATRX | [′TGCACTGCTTGTGGACAACAGGTCARTCAT |
| | (p.Asn179Ser) | | | TTTCAAAAAGATTCCATTTAT′] |
| 4605 | NM_000512.4(GALNS): | 2588 | GALNS | [′CTTCTATTACCGTGGCGACACGCTGRTGGC |
| | c.1171A > G (p.Met391Val) | | | GGCCACCCTCGGGCAGCACAA′] |
| 4606 | NM_000521.3(HEXB): | 3074 | HEXB | [′ATGTATTGCAATTTGTAACGTTAATRGCTT |
| | c.1243 − 2A > G | | | GCGCCGGGCACAATAGTTGAA′] |
| 4607 | NM_000531.5(OTC): c.238A > G | 5009 | OTC | [′ATAGTATTTGCCTTTATTGCAAGGGRAGTC |
| | (p.Lys80Glu) | | | CTTAGGCATGATTTTTGAGAA′] |
| 4608 | NM_000551.3(VHL): c.233A > G | 7428 | VHL | [′GAGCCCTCCCAGGTCATCTTCTGCARTCGC |
| | (p.Asn78Ser) | | | AGTCCGCGCGTCGTGCTGCCC′] |
| 4609 | NM_001848.2(COL6A1): | 1291 | COL6A1 | [′CCAACCTTGACCTGTTTTGTGTTCCRGGGA |
| | c.805 − 2A > G | | | GAACGAGGCAAGCCGGGGCTC′] |
| 4610 | NM_001918.3(DBT): | 1629 | DBT | [′AATGAATAACAATTTAATGCTTTTCRGGCT |
| | c.773 − 2A > G | | | TTCAAAAAGCAATGGTCAAGA′] |
| 4611 | NM_003482.3(KMT2D): | 8085 | KMT2D | [′TCAACAGTGTCCTTCATTCCCCCACRGAAC |
| | c.5645 − 2A > G | | | TGCCCAAGATGGAATCCAAGG′] |
| 4612 | NM_003494.3(DYSF): | 8291 | DYSF | [′CAGGCCCTCTCTGCTCCCTTGCTCTRGGGA |
| | c.1398 − 2A > G | | | CCGCCTGACTCACAATGACAT′] |
| 4613 | NM_004006.2(DMD): | 1756 | DMD | [′AAGAGGTCATAATAGGCTTCTTTCAVATTT |
| | c.1332 − 9A > G | | | TCAGTTTACATAGAGTTTTAA′] |
| 4614 | NM_004006.2(DMD): | 1756 | DMD | [′AGTGGGATCACATGTGCCAACAGGTRTAG |
| | c.3432 + 3A > G | | | ACAATCTCTTTCACTGTGGCTT′] |
| 4615 | NM_004006.2(DMD): | 1756 | DMD | [′AAACGTTGTTGCATTTGTCTGTTTCRGTTA |
| | c.6763 − 2A > G | | | CTGGTGGAAGAGTTGCCCCTG′] |
| 4616 | NM_004006.2(DMD): | 1756 | DMD | [′AGCTGTGAATGCTTCATTCAGGCCCRAGTA |
| | c.9224 + 61934A > G | | | AATATAGGAAGAGGTGTAGTG′] |
| 4617 | NM_004006.2(DMD): | 1756 | DMD | [′GCTGTGAATGCTTCATTCAGGCCCARGTAA |
| | c.9225 − 647A > G | | | ATATAGGAAGAGGTGTAGTGG′] |
| 4618 | NM_004006.2(DMD): | 1756 | DMD | [′TGTTGCAATTTTCTTCTTCCTTTGTRGACCT |
| | c.9650 − 2A > G | | | TTTCAAGCAAGTGGCAAGTT′] |
| 4619 | NM_015560.2(OPA1): c.983A > G | 4976 | OPA1 | [′GAGATGATGACACGTTCTCCAGTTAVGGT |
| | (p.Lys328Arg) | | | AAGAACATAGGCCGTCTCAGTG′] |
| 4620 | NM_144997.5(FLCN): | 201163 | FLCN | [′TTGCTCTGCCCCTGCCCTTCTCCCCRGTGG |
| | 2c.1433 − A > G | | | GCCCCACCATCCTGAATAAGA′] |
| 4621 | NM_144997.5(FLCN): | 201163 | FLCN | [′AGATTTACTTTTCCTTTTCATGGACRGGGC |
| | c.250 − 2A > G | | | TGCCGGTCACTTGCTGCAGGG′] |
| 4622 | NM_000146.3(FTL): c.1A > G | 2512 | FTL | [′GTTAGCTCCTTCTTGCCAACCAACCRTGAG |
| | (p.Met1Val) | | | CTCCCAGATTCGTCAGAATTA′] |
| 4623 | NM_024531.4(SLC52A2): | 79581 | SLC52A2 | [′GTGCAGAGCTTTTCCTGCTTACCCTRCGGG |
| | c.914A > G (p.Tyr305Cys) | | | CGTCTGGCCTACCACCTGGCT′] |
| 4624 | NM_001743.5(CALM2): c.293A > G | 805 | CALM2 | [′TACTAAATTTTTTGCTAGGATGGCADTGGC |
| | (p.Asn98Ser) | | | TATATTAGTGCTGCAGAACTT′] |
| 4625 | NM_014754.2(PTDSS1): c.1058A > | 9791 | PTDSS1 | [′ACACAGTGCAAGCGCGTAGGAACACRATG |
| | G (p.Gln353Arg) | | | CTGGGTGTTTGGGTGAGTAATC′] |
| 4626 | NM_052844.3(WDR34): c.1307A > | 89891 | WDR34 | [′GGACCAGCGCACAGCAAACAGATACYTGA |
| | G (p.Lys436Arg) | | | GGGAGAGCTGCAGCGAAGTCAA′] |
| 4627 | NM_001130010.2(C15orf41): | 84529 | C15orf41 | [′TACTTCTGTTTTATAAAGGTGGACTVTGCG |
| | c.281A > G (p.Tyr94Cys) | | | CCCTCATTAATGGCTCGGCTT′] |
| 4628 | NM_001290048.1(ATL3): c.521A > | 25923 | ATL3 | [′AATTTCATCCATTGCCAGACGACCGYATTC |
| | G (p.Tyr174Cys) | | | TGTGAAGAGCTTTAAAAAAGA′] |
| 4629 | NM_000531.5(OTC): c.1034A > G | 5009 | OTC | [′GTCATGGTGTCCCTGCTGACAGATTRCTCA |
| | (p.Tyr345Cys) | | | CCTCAGCTCCAGAAGCCTAAA′] |
| 4630 | NM_000531.5(OTC): c.122A > G | 5009 | OTC | [′AATAAAGTGCAGCTGAAGGGCCGTGRCCT |
| | (p.Asp41Gly) | | | TCTCACTCTAAAAAACTTTACC′] |
| 4631 | NM_000531.5(OTC): c.155A > G | 5009 | OTC | [′ACTCTAAAAAACTTTACCGGAGAAGRAAT |
| | (p.Glu52Gly) | | | TAAATATATGCTATGGCTATCA′] |
| 4632 | NM_000531.5(OTC): c.1A > G | 5009 | OTC | [′TCGTCCTTTACACAATTAAAAGAAGDTGCT |
| | (p.Met1Val) | | | GTTTAATCTGAGGATCCTGTT′] |
| 4633 | NM_000531.5(OTC): c.268A > G | 5009 | OTC | [′CTTAGGCATGATTTTTGAGAAAAGARGTA |
| | (p.Ser90Gly) | | | CTCGAACAAGATTGTCTACAGA′] |
| 4634 | NM_000531.5(OTC): c.277A > G | 5009 | OTC | [′GATTTTTGAGAAAAGAAGTACTCGARCAA |
| | (p.Thr93Ala) | | | GATTGTCTACAGAAACAGGTAA′] |
| 4635 | NM_000531.5(OTC): c.350A > G | 5009 | OTC | [′TGTTTTCTTACCACACAAGATATTCDTTTG |
| | (p.His117Arg) | | | GGTGTGAATGAAAGTCTCACG′] |
| 4636 | NM_000531.5(OTC): c.377A > G | 5009 | OTC | [′TTGGGTGTGAATGAAAGTCTCACGGRCAC |
| | (p.Asp126Gly) | | | GGCCCGGTTTGTAAATATTTTC′] |
| 4637 | NM_000531.5(OTC): | 5009 | OTC | [′GATTATCTTTTTCTTGGTTTGCCACNGTGT |
| | c.387 − 2A > G | | | ATTGTCTAGCATGGCAGATGC′] |
| 4638 | NM_000531.5(OTC): c.481A > G | 5009 | OTC | [′TAAAGAAGCATCCATCCCAATTATCRATG |
| | (p.Asn161Asp) | | | GGCTGTCAGATTTGTACCATCC′] |
| 4639 | NM_000531.5(OTC): c.482A > G | 5009 | OTC | [′AAAGAAGCATCCATCCCAATTATCARTGG |
| | (p.Asn161Ser) | | | GCTGTCAGATTTGTACCATCCT′] |
| 4640 | NM_000531.5(OTC): c.503A > G | 5009 | OTC | [′ATCAATGGGCTGTCAGATTTGTACCVTCCT |
| | (p.His168Arg) | | | ATCCAGATCCTGGCTGATTAC′] |
| 4641 | NM_000531.5(OTC): c.524A > G | 5009 | OTC | [′TACCATCCTATCCAGATCCTGGCTGDTTAC |
| | (p.Asp175Gly) | | | CTCACGCTCCAGGTTGGTTTA′] |
| 4642 | NM_000531.5(OTC): c.527A > G | 5009 | OTC | [′CATCCTATCCAGATCCTGGCTGATTRCCTC |
| | (p.Tyr176Cys) | | | ACGCTCCAGGTTGGTTTATTT′] |
| 4643 | NM_000531.5(OTC): | 5009 | OTC | [′TCATCTCCTTCATCCCGTGCCTTTTRGGAA |
| | c.541 − 2A > G | | | CACTATAGCTCTCTGAAAGGT′] |
| 4644 | NM_000531.5(OTC): c.542A > G | 5009 | OTC | [′TCTCCTTCATCCCGTGCCTTTTAGGRACAC |
| | (p.Glu181Gly) | | | TATAGCTCTCTGAAAGGTCTT′] |
| 4645 | NM_000531.5(OTC): c.548A > G | 5009 | OTC | [′TCATCCCGTGCCTTTTAGGAACACTRTAGC |
| | (p.Tyr183Cys) | | | TCTCTGAAAGGTCTTACCCTC′] |
| 4646 | NM_000531.5(OTC): c.595A > G | 5009 | OTC | [′CCTCAGCTGGATCGGGGATGGGAACRATA |
| | (p.Asn199Asp) | | | TCCTGCACTCCATCATGATGAG′] |
| 4647 | NM_000531.5(OTC): c.596A > G | 5009 | OTC | [′CTCAGCTGGATCGGGGATGGGAACARTAT |
| | (p.Asn199Ser) | | | CCTGCACTCCATCATGATGAGC′] |
| 4648 | NM_000531.5(OTC): c.613A > G | 5009 | OTC | [′TGGGAACAATATCCTGCACTCCATCRTGAT |
| | (p.Met205Val) | | | GAGCGCAGCGAAATTCGGAAT′] |
| 4649 | NM_000531.5(OTC): c.716A > G | 5009 | OTC | [′AAGTTGGCAGAGCAGTATGCCAAAGDGGT |
| | (p.Glu239Gly) | | | ATGCTCTTTACATGTAAAGCTA′] |
| 4650 | NM_000531.5(OTC): | 5009 | OTC | [′TGGCAGAGCAGTATGCCAAAGAGGTRTGC |
| | c.717 + 3A > G | | | TCTTTACATGTAAAGCTATTAT′] |
| 4651 | NM_000531.5(OTC): | 5009 | OTC | [′TTTAACCAGCGTGTTTATGTATGCTRGAAT |
| | c.718 − 2A > G | | | GGTACCAAGCTGTTGCTGACA′] |
| 4652 | NM_000531.5(OTC): c.788A > G | 5009 | OTC | [′CATGGAGGCAATGTATTAATTACAGRCAC |
| | (p.Asp263Gly) | | | TTGGATAAGCATGGGACAAGAA′] |
| 4653 | NM_000531.5(OTC): c.790A > G | 5009 | OTC | [′TGGAGGCAATGTATTAATTACAGACRCTTG |
| | (p.Thr264Ala) | | | GATAAGCATGGGACAAGAAGA′] |
| 4654 | NM_000531.5(OTC): c.905A > G | 5009 | OTC | [′GCTGCCTCTGACTGGACATTTTTACDCTGC |
| | (p.His302Arg) | | | TTGCCCAGAAAGCCAGAAGAA′] |
| 4655 | NM_000531.5(OTC): c.929A > G | 5009 | OTC | [′CACTGCTTGCCCAGAAAGCCAGAAGRAGT |
| | (p.Glu310Gly) | | | GGATGATGAAGTCTTTTATTCT′] |
| 4656 | NM_000531.5(OTC): c.988A > G | 5009 | OTC | [′ACTAGTGTTCCCAGAGGCAGAAAACRGAA |
| | (p.Arg330Gly) | | | AGTGGACAATCATGGTAAGCAA′] |
| 4657 | NM_000322.4(PRPH2): c.422A > G | 5961 | PRPH2 | [′GGGCTCAAGAACGGCATGAAGTACTRCCG |
| | (p.Tyr141Cys) | | | GGACACAGACACCCCTGGCAGG′] |
| | NM_003590.4(CUL3): | 8452 | CUL3 | [] |
| | c.1207 − 26A > G | | | |
| | NM_003590.4(CUL3): c.1376A > G | 8452 | CUL3 | [] |
| | (p.Lys459Arg) | | | |
| | NM_003590.4(CUL3): | 8452 | CUL3 | [] |
| | c.1377 + 3A > G | | | |
| 4658 | NM_017415.2(KLHL3): c.232A > G | 26249 | KLHL3 | [′AGCCTGCAGCCCCTACTTCTGTGCGDTGTT |
| | (p.Met78Val) | | | CACAGGTATGGTGAGTGGCCA′] |
| | NM_017415.2(KLHL3): c.926A > G | 26249 | KLHL3 | [] |
| | (p.Gln309Arg) | | | |
| 4659 | NM_005763.3(AASS): c.874A > G | 10157 | AASS | [′CTCACATCAGTATTAAAACGACTTAYGTA |
| | (p.Ile292Val) | | | GCGCTCCGGATGTTTGTCATAC′] |
| 4660 | NM_000203.4(IDUA): c.1874A > G | 3425 | IDUA | [′TCCTACCGAGTTCGAGCCCTGGACTRCTGG |
| | (p.Tyr625Cys) | | | GCCCGACCAGGCCCCTTCTCG′] |
| 4661 | NM_000546.5(TP53): c.736A > G | 7157 | TP53 | [′GTGTAACAGTTCCTGCATGGGCGGCVTGA |
| | (p.Met246Val) | | | ACCGGAGGCCCATCCTCACCAT′] |
| 4662 | NM_194442.2(LBR): c.1639A > G | 3930 | LBR | [′GCCATGATGAGATCACCCAAGTAATYGGG |
| | (p.Asn547Asp) | | | GTGGCGAACAAAGCCCCACCAT′] |
| 4663 | NM_000090.3(COL3A1): | 1281 | COL3A1 | [′ATTAAAAAATATTTTTATTTCCTCTRGGGT |
| | c.2284 − 2A > G | | | CCTACTGGTCCTATTGGTCCT′] |
| | (p.Gly762_Lys779del) | | | |
| 4664 | NM_000090.3(COL3A1): | 1281 | COL3A1 | [′TCTTGAAATTGTATTTAATTTTTTCRGGGC |
| | c.997 − 2A > G | | | CCTCCTGGTCCTCCTGGAACT′] |
| | (p.Gly333_Lys350del+) | | | |
| 4665 | NM_000090.3(COL3A1): | 1281 | COL3A1 | [′CATTGTGATGTCATGATACTTTCTTDGGGA |
| | c.3418 − 2A > G | | | CCTGTTGGACCCAGTGGACCT′] |
| | (p.Arg1139_Gly1140ins | | | |
| | VSSTERYYRSTCFRCLHFRKIFWHCDVMILSW) | | | |
| 4666 | NM_000090.3(COL3A1): | 1281 | COL3A1 | [′AAAAGAGCTCTTGAAATTGTATTTARTTTT |
| | c.997 − 10A > G | | | TTCAGGGCCCTCCTGGTCCTC′] |
| | (p.Pro332_Gly333insFFQ) | | | |
| 4667 | NM_000090.3(COL3A1): | 1281 | COL3A1 | [′ACAGAGTGTATCATTATACTTTTCTDGGGG |
| | c.1870 − 2A > G | | | CCTGGTGGTGACAAAGGAGAC′] |
| | (p.Gly624_Gln641del) | | | |
| 4668 | NM_000090.3(COL3A1): | 1281 | COL3A1 | [′CTTCTCAATTGAATGTTTTCATCTTRGGGC |
| | 2c.3202 − A > G | | | CCTGCTGGCCCTGCTGGTGCT′] |
| | (p.Gly1068_Pro1085del) | | | |
| 4669 | NM_000090.3(COL3A1): | 1281 | COL3A1 | [′AGTAAATACCGACCACTTCTTCTTTRGGGT |
| | 2c.1762 − A > G | | | GCTCCTGGTAAGAATGGAGAA′] |
| | (p.Gly588_Gln605del) | | | |
| 4670 | NM_003611.2(OFD1): | 8481 | OFD1 | [′CTTTTTGGCAATAATGAAAAGGTAARTTGA |
| | c.935 + 706A > G | | | TCAAGAGAGAGGAAATAGGCA′] |
| 4671 | NM_014740.3(EIF4A3): c.809A > G | 9775 | EIF4A3 | [′AGTGATGGTCAGTGTGTCGTAGAGGYCAC |
| | (p.Asp270Gly) | | | ACAGAGTGTCAAATTTCCACTC′] |
| 4672 | NM_001040436.2(YARS2): | 51067 | YARS2 | [′TTTGTTACTTGTTGGTGATTTATGCYGACT |
| | c.1303A > G (p.Ser435Gly) | | | CCGCCTTCTGTTATCATTCGA′] |
| 4673 | NM_000277.1(PAH): c.1157A > G | 5053 | PAH | [′ACTGTCACGGAGTTCCAGCCCCTCTRTTAC |
| | (p.Tyr386Cys) | | | GTGGCAGAGAGTTTTAATGAT′] |
| 4674 | NM_000277.1(PAH): c.812A > G | 5053 | PAH | [′TTCCACTGCACACAGTACATCAGACDTGG |
| | (p.His271Arg) | | | ATCCAAGCCCATGTATACCCCC′] |
| 4675 | NM_004820.3(CYP7B1): c.889A > G | 9420 | CYP7B1 | [′ATTGCCCAGAACATAGTTGGAATAGYGTT |
| | (p.Thr297Ala) | | | TGCCACAGAGGCCCAGAGAAAG′] |
| 4676 | NM_024301.4(FKRP): c.1A > G | 79147 | FKRP | [′CCAGCTAGCCCCAGACTTCGGCCCCRTGCG |
| | (p.Met1Val) | | | GCTCACCCGCTGCCAGGCTGC′] |
| 4677 | NM_001955.4(EDN1): c.271A > G | 1906 | EDN1 | [′GTATGGACTTGGAAGCCCTAGGTCCRAGA |
| | (p.Lys91Glu) | | | GAGCCTTGGAGAATTTACTTCC′] |
| 4678 | NM_198947.3(FAM111B): | 374393 | FAM111B | [′TAATGTATACTGTATGTTTACCCAARGAAG |
| | c.1879A > G (p.Arg627Gly) | | | TTTCCTATCAGAGGTTTGGAA′] |
| 4679 | NM_001282227.1(CECR1): | 51816 | CECR1 | [′GCCCATGAAGACCTCATAGAAATCAYAGG |
| | c.1232A > G (p.Tyr411Cys) | | | ACAAGCCTTTGGCACCAAACAT′] |
| 4680 | NM_033419.4(PGAP3): c.914A > G | 93210 | PGAP3 | [′TGATTCCTTCAGCAGGTACAGGCTGYCATC |
| | (p.Asp305Gly) | | | TTCCAGAAAGCTGTGGGCCAA′] |
| 4681 | NM_007294.3(BRCA1): | 672 | BRCA1 | [′TGTTCTTTCTTTCTTTATAATTTATRGATTT |
| | c.135 − 2A > G | | | TGCATGCTGAAACTTCTCAA′] |
| 4682 | NM_007294.3(BRCA1): | 672 | BRCA1 | [′AAATTAAACTTCTCCCATTCCTTTCRGAGG |
| | c.4676 − 2A > G | | | GAACCCCTTACCTGGAATCTG′] |
| 4683 | NM_015474.3(SAMHD1): | 25939 | SAMHD1 | [′GGAAATGACAATCAAGTTTCTTACAYTGT |
| | c.1153A > G (p.Met385Val) | | | ATCAATAATGTTGCCAACTTTG′] |
| 4684 | NM_015474.3(SAMHD1): | 25939 | SAMHD1 | [′TTTTGGAAGAGATTCATAGTCCTCCYGGAA |
| | c.1411 − 2A > G | | | AACACAAGACTCCCCATGTTA′] |
| 4685 | NM_000097.5(CPOX): c.980A > G | 1371 | CPOX | [′ACCAATGCCCCGCCGTTCTCCACGAYGGG |
| | (p.His327Arg) | | | CTATAAAGAAGTAATCATCACA′] |
| 4686 | NM_012338.3(TSPAN12): c.413A | 23554 | TSPAN12 | [′AAGCCACCGATATCTAGGTAATCCAYAAT |
| | G (p.Tyr138Cys) | | | TTGTCATCCTGGCTTTCAAAGT′] |
| 4687 | NM_000406.2(GNRHR): c.94A > G | 2798 | GNRHR | [′GTCACTCGGATCTTTCCAGACAAGGYCAG |
| | (p.Thr32Ala) | | | AGTGGGGAGGTTGCCCTGCATC′] |
| 4688 | NM_199189.2(MATR3): c.1864A > | 9782 | MATR3 | [′TGGTTCCCAGAAGACTGAGAGTTCARCCG |
| | G (p.Thr622Ala) | | | AAGGTAAAGAACAAGAAGAGAA′] |
| 4689 | NM_003181.3(T): c.512A > G | 6862 | T | [′CTGTGGACCCCCAACTCTCACTATGYGGAT |
| | (p.His171Arg) | | | TCGAGGCTCATACTTATGCAA′] |
| 4690 | NM_000321.2(RB1): c.1927A > G | 5925 | RB1 | [′AGCCTTCCAGACCCAGAAGCCATTGRAAT |
| | (p.Lys643Glu) | | | CTACCTCTCTTTCACTGTTTTA′] |
| 4691 | NM_002234.3(KCNA5): c.143A > G | 3741 | KCNA5 | [′GCTGGGCTCAGCGATGGGCCCAAGGRGCC |
| | (p.Glu48Gly) | | | GGCGCCAAAGGGGCGCGGCGCG′] |
| 4692 | NM_178014.3(TUBB): c.895A > G | 203068 | TUBB | [′CCAGCAGGTCTTCGATGCCAAGAACRTGA |
| | (p.Met299Val) | | | TGGCTGCCTGTGACCCCCGCCA′] |
| 4693 | NM_000136.2(FANCC): | 2176 | FANCC | [′TGCTTCTATTTGTTCCCTTTCTTACRGATTT |
| | c.−78 − 2A > G | | | AATGTGTGCCGACCATTTCC′] |
| 4694 | NM_000546.5(TP53): c.488A > G | 7157 | TP53 | [′CTCCGTCATGTGCTGTGACTGCTTGYAGAT |
| | (p.Tyr163Cys) | | | GGCCATGGCGCGGACGCGGGT′] |
| 4695 | NM_000546.5(TP53): c.659A > G | 7157 | TP53 | [′TTTCGACATAGTGTGGTGGTGCCCTVTGAG |
| | (p.Tyr220Cys) | | | CCGCCTGAGGTCTGGTTTGCA′] |
| 4696 | NM_000546.5(TP53): c.701A > G | 7157 | TP53 | [′GGCTCTGACTGTACCACCATCCACTRCAAC |
| | (p.Tyr234Cys) | | | TACATGTGTAACAGTTCCTGC′] |
| 4697 | NM_002878.3(RAD51D): c.1A > G | −1 | — | [′CACAGTCCGACCCTGAGCACGCCCAYGTT |
| | (p.Met1Val) | | | CCCCGCAGGCCGGAACAGCCCC′] |
| 4698 | NM_058216.2(RAD51C): | 5889 | RAD51C | [′ATCTAATATTATCTCTTCTGTATTTRGGTTC |
| | c.706 − 2A > G | | | GACTAGTGATAGTGGATGGT′] |
| 4699 | NM_015713.4(RRM2B): c.556A > G | 50484 | RRM2B | [′TCTACAGCAGCAAAGGCCACCACTCYTTC |
| | (p.Arg186Gly) | | | CCCTGGGAGACATAAAATCGTT′] |
| 4700 | NM_015713.4(RRM2B): c.581A > G | 50484 | RRM2B | [′AAAAGATCCTGAGAAGAAAACTCCTYCTA |
| | (p.Glu194Gly) | | | CAGCAGCAAAGGCCACCACTCT′] |
| 4701 | NM_000219.5(KCNE1): c.242A > G | 3753 | KCNE1 | [′CACTCGAACGACCCATTCAACGTCTDCATC |
| | (p.Tyr81Cys) | | | GAGTCCGATGCCTGGCAAGAG′] |
| 4702 | NM_000271.4(NPC1): c.1832A > G | 4864 | NPC1 | [′TTCACTGCTGAACGAAGTATTGAAGRTGA |
| | (p.Asp611Gly) | | | ACTAAATCGTGAAAGTGACAGT′] |
| 4703 | NM_000257.3(MYH7): c.1952A > G | 4625 | MYH7 | [′CTGGGGCTGTGTCCCACTCACCCTGYGCAG |
| | (p.His651Arg) | | | AGCTGACACAGTCTGAAAGGA′] |
| 4704 | NM_000540.2(RYR1): c.7043A > G | 6261 | RYR1 | [′GGGTGGCCAGGCGAGAGCGTGGAGGRGA |
| | (p.Glu2348Gly) | | | ACGCCAATGTGGTGGTGCGGCTG′] |
| 4705 | NM_058216.2(RAD51C): | 5889 | RAD51C | [′TTTGTATATATATTTTTTATCTTTCRGCCTC |
| | c.1027 − 2A > G | | | AGGGATTTAGAGATACTGTT′] |
| 4706 | NM_130838.1(UBE3A): | 7337 | UBE3A | [′TGTATTTTTAAAAATCATTTCTTATRGGTA |
| | c.1694 − 2A > G | | | TGTTCACATACGATGAATCTA′] |
| 4707 | NM_022168.3(IFIH1): c.1009A > G | 64135 | IFIH1 | [′TCCTTGGCAATGTAAACAGCCACTCYGGTT |
| | (p.Arg337Gly) | | | TTTCCACTCCCTGTAGGGAGG′] |
| 4708 | NM_022068.3(PIEZO2): c.2134A > | 63895 | PIEZO2 | [′GCCACACAGAACAGGAACAGCACCAYGTA |
| | G (p.Met712Val) | | | GATGATTTTGTACATTACGATT′] |
| 4709 | NM_001164342.2(ZBTB20): | 26137 | ZBTB20 | [′ACCGCCAAACAGAACTACGTCAAGCRCAT |
| | c.1787A > G (p.His596Arg) | | | GTTCGTACACACAGGTGAGTGT′] |
| 4710 | NM_001128159.2(VPS53): | 55275 | VPS53 | [′TGCCTGATACTACGTCCATCTCACCYGTTC |
| | c.2084A > G (p.Gln695Arg) | | | TGCTCCCACCATGCTAATTGG′] |
| 4711 | NM_003108.3(SOX11): c.347A > G | 6664 | SOX11 | [′AAGCACATGGCCGACTACCCCGACTRCAA |
| | (p.Tyr116Cys) | | | GTACCGGCCCCGGAAAAAGCCC′] |
| 4712 | NM_020435.3(GJC2): | 57165 | GJC2 | [′TTCAGACCCTGAGGCCGAGGGGGGARCAA |
| | c.−170A > G | | | TGGGGCCCTTGAGGGCCCCTCC′] |
| 4713 | NM_004817.3(TJP2): | 9414 | TJP2 | [′GATTTACTTCCCGTGGTTTCTTCTCRGAGC |
| | c.1992 − 2A > G | | | TGAACAAATGGCCAGTGTTCA′] |
| 4714 | NM_017565.3(FAM20A): | −1 | — | [′GGTGTCTCCTCATCTCGCTGCTGTCYGGAA |
| | c.720 − 2A > G | | | GGAAGGAAGGAATCACGCCCT′] |
| 4715 | NM_002764.3(PRPS1): c.343A > G | 5631 | PRPS1 | [′AATCTCAGCCAAGCTTGTTGCAAATRTGCT |
| | (p.Met115Val) | | | ATCTGTAGCAGGTGCAGATCA′] |
| 4716 | NM_000216.2(ANOS1): c.1A > G | 3730 | ANOS1 | [′TCGCCCTCGCCCTCGACCCGCAGCCRTGGT |
| | (p.Met1Val) | | | GCCCGGGGTGCCCGGCGCGGT′] |
| 4717 | NM_031229.2(RBCK1): c.1160A > | 10616 | RBCK1 | [′TGGTGCTTCTTTGAGGATGATGTCARTGAG |
| | G (p.Asn387Ser) | | | TTCACCTGCCCTGTGTGTTTC′] |
| 4718 | NM_015599.2(PGM3): c.737A > G | 5238 | PGM3 | [′CACAAAGTCAGCTCCACATAAATGAYTGA |
| | (p.Asn246Ser) | | | GTTTGCCCTTGGACCCATCATT′] |
| 4719 | NM_015599.2(PGM3): c.1352A > G | 5238 | PGM3 | [′TTTCTCTCACACCTGAACTTTAAGTYGTCT |
| | (p.Gln451Arg) | | | GTTTGGAAGATCTGTATAGAG′] |
| 4720 | NM_000535.5(PMS2): | 5395 | PMS2 | [′CTTTTCTACTCCTTGTATTTTGTGCRGGTCT |
| | c.904 − 2A > G | | | GCAGACTCGTGAATGAGGTC′] |
| 4721 | NM_000546.5(TP53): c.358A > G | 7157 | TP53 | [′GGGCTTCTTGCATTCTGGGACAGCCDAGTC |
| | (p.Lys120Glu) | | | TGTGACTTGCACGGTCAGTTG′] |
| 4722 | NM_000546.5(TP53): c.842A > G | 7157 | TP53 | [′CGTGTTTGTGCCTGTCCTGGGAGAGDCCGG |
| | (p.Asp281Gly) | | | CGCACAGAGGAAGAGAATCTC′] |
| 4723 | NM_001128425.1(MUTYH): | 4595 | MUTYH | [′CCCCTGCCTGGCTGCCCTCCCTCTCRGGTC |
| | c.1187 − 2A > G | | | TGCTGGCAGGACTGTGGGAGT′] |
| 4724 | NM_000546.5(TP53): | 7157 | TP53 | [′TCTCCTCCCTGCTTCTGTCTCCTACRGCCAC |
| | c.1101 − 2A > G | | | CTGAAGTCCAAAAAGGGTCA′] |
| 4725 | NM_000314.6(PTEN): | 5728 | PTEN | [′GGCTTCTCTTTTTTTTCTGTCCACCRGGGA |
| | c.493 − 2A > G | | | GTAACTATTCCCAGTCAGAGG′] |
| 4726 | NM_000051.3(ATM): | 472 | ATM | [′ATATATTTTAATTTTGTGCCCTTGCRGATT |
| | c.3994 − 2A > G | | | GATCACTTATTCATTAGTAAT′] |
| 4727 | NM_000314.6(PTEN): c.403A > G | 5728 | PTEN | [′TGGAAAGGGACGAACTGGTGTAATGRTAT |
| | (p.Ile135Val) | | | GTGCATATTTATTACATCGGGG′] |
| 4728 | NM_000249.3(MLH1): | 4292 | MLH1 | [′TAAATTATTTTCTGTTTGATTTGCCDGTTTA |
| | c.117 − 2A > G | | | GATGCAAAATCCACAAGTAT′] |
| 4729 | NM_025150.4(TARS2): | 80222 | TARS2 | [′GGTCCAACAGCAACAGTATATGGGTRAGA |
| | c.695 + 3A > G | | | GTTGTCAAGATTAAGGCAAACA′] |
| 4730 | NM_206933.2(USH2A): c.10544A > | 7399 | USH2A | [′TGGACCAAAATAGACAATCTTGAAGVTAC |
| | G (p.Asp3515Gly) | | | AATTGTCTTAAACTGGAGAAAA′] |
| 4731 | NM_000834.3(GRIN2B): c.1238A > | 2904 | GRIN2B | [′CATCTGAGCATTGTGACCCTGGAGGRGGC |
| | G (p.Glu413Gly) | | | ACCATTTGTCATTGTGGAAAGT′] |
| 4732 | NM_004830.3(MED23): c.3638A > | 9439 | MED23 | [′TGTAGCTATACGTTAGCTCTTGCACRTGCT |
| | G (p.His1213Arg) | | | GTGTGGCACCATTCTAGCATC′] |
| 4733 | NM_003159.2(CDKL5): c.125A > G | 6792 | CDKL5 | [′GAAACACATGAAATTGTGGCGATCARGAA |
| | (p.Lys42Arg) | | | ATTCAAGGACAGTGAAGGTAGA′] |
| 4734 | NM_003159.2(CDKL5): c.380A > G | 6792 | CDKL5 | [′CTAATCAAGGCTATTCACTGGTGCCRTAAG |
| | (p.His127Arg) | | | AATGATATTGTCCATCGAGGT′] |
| 4735 | NM_003159.2(CDKL5): c.578A > G | 6792 | CDKL5 | [′AGCGCTCCCTATGGAAAGTCCGTGGRCAT |
| | (p.Asp193Gly) | | | GTGGTCGGTGGGCTGTATTCTT′] |
| 4736 | NM_198282.3(TMEM173): | 340061 | TMEM173 | [′TGACCATGCCAGCCCATGGGCCACGYTGA |
| | c.461A > G (p.Asn154Ser) | | | AATTCCCTTTTTCACACACTGC′] |
| 4737 | NM_032018.6(SPRTN): c.350A > G | 83932 | SPRTN | [′CTCCTGCATGAAATGATACATGCCTRTTTA |
| | (p.Tyr117Cys) | | | TTTGTCACTAATAACGACAAA′] |
| 4738 | NM_001759.3(CCND2): c.838A > G | 894 | CCND2 | [′GGAGGATGAACTGGACCAAGCCAGCRCCC |
| | (p.Thr280Ala) | | | CTACAGACGTGCGGGATATCGA′] |
| 4739 | NM_007315.3(STAT1): c.854A > G | 6772 | STAT1 | [′AGGGTCATGTTCGTAGGTGTATTTCYGTTC |
| | (p.Gln285Arg) | | | CAATTCCTCCAACTTTTTAAG′] |
| 4740 | NM_139276.2(STAT3): c.1175A > G | 6774 | STAT3 | [′GTTGGATTCTTCCATGTTCATCACTYTTGT |
| | (p.Lys392Arg) | | | GTTTGTGCCCAGAATGTTAAA′] |
| 4741 | NM_001037811.2(HSD17B10): | 3028 | HSD17B10 | [′GATGCCTGCACAGTTGACAGCTACAYCCA |
| | 7c.25A > G (p.Asp86Gly) | | | CACGGCCAAACTTTCCTTTTGC′] |
| 4742 | NM_005726.5(TSFM): | 10102 | TSFM | [′CGCGCGGACCGGGAGCTACCCGGTGRGAA |
| | c.57 + 4A > G | | | GTCCTGGTGCTGGTACCGACCT′] |
| 4743 | NM_000166.5(GJB1): c.580A > G | 2705 | GJB1 | [′CGAGAAAACCGTCTTCACCGTCTTCRTGCT |
| | (p.Met194Val) | | | AGCTGCCTCTGGCATCTGCAT′] |
| 4744 | NM_001077494.3(NFKB2): | 4791 | NFKB2 | [′TTACCCCCAGCAGAGGTGAAGGAAGRCAG |
| | c.2594A > G (p.Asp865Gly) | | | TGCGTACGGGAGCCAGTCAGTG′] |
| 4745 | NC_012920.1: m.5559A > G | 4578 | MT-TW | [′TGTTACAGAAATTAAGTATTGCAACYTACT |
| | | | | GAGGGCTTTGAAGGCTCTTGG′] |
| 4746 | NC_012920.1: m.13514A > G | 4540 | MT-ND5 | [′TTCCTCACAGGTTTCTACTCCAAAGRCCAC |
| | | | | ATCATCGAAACCGCAAACATA′] |
| 4747 | NM_007315.3(STAT1): c.2018A > G | 6772 | STAT1 | [′GTAATACTTTCCAAAGGCATGGTCTYTGTC |
| | (p.Lys673Arg) | | | AATATTTGGATACAGATACTT′] |
| 4748 | NM_007315.3(STAT1): c.1909A > G | 6772 | STAT1 | [′GGGAAAGTAACAGCAGAAAGTTCTTYCTT |
| | (p.Lys637Glu) | | | CGTGTAGGGTTCAACCGCATGG′] |
| 4749 | NM_000060.3(BTD): c.683A > G | 686 | BTD | [′GCATTCGATGTTCCTCTTAAAGTGGRTCTC |
| | (p.Asp228Gly) | | | ATCACCTTTGATACCCCCTTT′] |
| 4750 | NM_004992.3(MECP2): | 4204 | MECP2 | [′TACTTACATACTTGTTTAACACTTCRGGGA |
| | c.27 − 2A > G | | | AGAAAAGTCAGAAGACCAGGA′] |
| 4751 | NM_004992.3(MECP2): | 4204 | MECP2 | [′CTTGTGTCTTTCTGTTTGTCCCCACNGTCCC |
| | c.378 − 2A > G | | | CAGGGAAAAGCCTTTCGCTC′] |
| 4752 | NM_003159.2(CDKL5): | 6792 | CDKL5 | [′TTTCCTTCTGCTTCTTTTCCCTTGCRGGAAA |
| | 2c.100 − A > G | | | CACATGAAATTGTGGCGATC′] |
| 4753 | NM_003159.2(CDKL5): | 6792 | CDKL5 | [′ACAACTTTGGACTTTGCTATCTTTCRGGTT |
| | 2c.464 − A > G | | | TTGCTCGTAATCTGTCAGAAGT |
| 4754 | NM_003159.2(CDKL5): | 6792 | CDKL5 | [′GATATACTTCTTTTGTTTTTAACATRGAAA |
| | c.978 − 2A > G | | | CCAAGCCGGCAAAAGTACTGC′] |
| 4755 | NM_032492.3(JAGN1): c.485A > G | 84522 | JAGN1 | [′TTGGCAGTGCAAGTGCATGCCTGGCRGTTG |
| | (p.Gln162Arg) | | | TACTACAGCAAGAAGCTCCTA′] |
| 4756 | NM_178517.3(PIGW): c.499A > G | 284098 | PIGW | [′AACTGAGCTCTATGGGACAGGAGCARTGG |
| | (p.Met167Val) | | | ATTTTGGAGTAGGTGGCTTTGT′] |
| 4757 | NM_004387.3(NKX2-5): c.461A > G | 1482 | NKX2-5 | [′TCGCAGGCGCAGGTCTATGAGCTGGRGCG |
| | (p.Glu154Gly) | | | GCGCTTCAAGCAGCAGCGGTAC′] |
| 4758 | NM_005859.4(PURA): c.289A > G | 5813 | PURA | [′CGCCGAGGTGGGCGCGGGCGGCAACRAGA |
| | (p.Lys97Glu) | | | GCCGCCTTACTCTCTCCATGTC′] |
| 4759 | NM_004046.5(ATP5A1): c.962A > G | 498 | ATP5A1 | [′GCGGAGCAACAGAGACATCTGACGGHAAG |
| | (p.Tyr321Cys) | | | CAACAGCCTATGGTACAGAATA′] |
| 4760 | NM_000038.5(APC): | 324 | APC | [′GATGACCCATATTCTGTTTCTTACTRGGAA |
| | c.1744 − 2A > G | | | TCAACCCTCAAAAGCGTATTG′] |
| 4761 | NM_000751.2(CHRND): c.1319A > | 1144 | CHRND | [′TTCAATGAGCTGAAGCCAGCTGTGGWTGG |
| | G (p.Asp440Gly) | | | GGCAAACTTCATTGTTAACCAC′] |
| 4762 | NM_130466.3(UBE3B): c.1A > G | 89910 | UBE3B | [′GCAGGGTTTGTGCAAGTTTGCAAACRTGTT |
| | (p.Met1Val) | | | CACCCTGTCTCAGACCTCGAG′] |
| 4763 | NM_003159.2(CDKL5): c.211A > G | 6792 | CDKL5 | [′AATGCTTCGGACTCTCAAGCAGGAARACA |
| | (p.Asn71Asp) | | | TTGTGGAGTTGAAGGAAGCATT′] |
| 4764 | NM_003159.2(CDKL5): | 6792 | CDKL5 | [′AATTTTTTTTTTATCTTGACACTCCRGATAT |
| | c.404 − 2A > G | | | AAAACCAGAAAATCTCTTAA′] |
| 4765 | NM_003159.2(CDKL5): c.449A > G | 6792 | CDKL5 | [′TTAATCAGCCACAATGATGTCCTAARACTG |
| | (p.Lys150Arg) | | | TGTGACTTTGGTAAGTTAAAA′] |
| 4766 | NM_001813.2(CENPE): c.4063A > G | 1062 | CENPE | [′ACTTCAAGGGCTTCTTTTATCGTTTYAAGG |
| | (p.Lys1355Glu) | | | TTGTCTCTTTCCTTGGTTAGA′] |
| 4767 | NM_023073.3(C5orf42): | 65250 | C5orf42 | [′ATTTTACCAAATTTTTGTATTTGATRGATC |
| | c.3290 − 2A > G | | | CCATTGAAGAGGAAGATGCAA′] |
| 4768 | NM_002977.3(SCN9A): c.2215A > G | −1 | — | [′GTGTTTAAAACTATGCAAATGGTAAYTGC |
| | (p.Ile739Val) | | | AAGATCTACAAAAGGATCCATT′] |
| 4769 | NM_002354.2(EPCAM): | 4072 | EPCAM | [′TATTAGTATTAATTTGTATTATTCANTTTTT |
| | c.556 − 14A > G | | | TTCCCCAGTATGAGAATAAT′] |
| 4770 | NM_002354.2(EPCAM): | 4072 | EPCAM | [′TTAATACAGATTTTAAATTCTTTACRGTGC |
| | c.492 − 2A > G | | | ACTTCAGAAGGAGATCACAAC′] |
| 4771 | NM_000053.3(ATP7B): c.122A > G | 540 | ATP7B | [′ATCCAGACCACCTTCATAGCCAACAYTGTC |
| | (p.Asn41Ser) | | | AAAAGCAAAACTCTTCTTCAT′] |
| 4772 | NM_022455.4(NSD1): | 64324 | NSD1 | [′ATGTGGGACATTATTTTTTCTTTGCRAGGG |
| | c.4498 − 3A > G | | | AGAACTAATGCCTCACAGGAC′] |
| 4773 | NM_022455.4(NSD1): | 64324 | NSD1 | [′TAAGTCAGGAGGTATTTCTTGTTCTRGGGT |
| | c.5893 − 2A > G | | | GAATTTGTGAATGAGTATGTG′] |
| 4774 | NM_022455.4(NSD1): c.6059A > G | 64324 | NSD1 | [′AAAGGAAACTATGCTCGGTTCATGARTCA |
| | (p.Asn2020Ser) | | | TTGCTGCCAGCCCAACTGTGAA′] |
| 4775 | NM_022455.4(NSD1): c.6356A > G | 64324 | NSD1 | [′GGTGAAATCACAAAGGAGCGAGAAGRTGA |
| | (p.Asp2119Gly) | | | GTGTTTTAGTTGTGGGGATGCT′] |
| 4776 | NM_133433.3(NIPBL): c.737A > G | 25836 | NIPBL | [′AATCCTAGACATGGTTCAAGTGAGGRCTA |
| | (p.Asp246Gly) | | | CCTACACATGGTGCACAGGCTA′] |
| 4777 | NM_133433.3(NIPBL): | 25836 | NIPBL | [′TGTTTTTTTCTCTTCATTTTTCTTTRGCTTG |
| | 2c.5428 − A > G | | | ATATGCAACGAGGTGTTCAT′] |
| 4778 | NM_005249.4(FOXG1): c.757A > G | 2290 | FOXG1 | [′CCACTACGACGACCCGGGCAAGGGCRACT |
| | (p.Asn253Asp) | | | ACTGGATGCTGGACCCGTCGAG′] |
| 4779 | NM_004380.2(CREBBP): c.4508A > | 1387 | CREBBP | [′AAGCCAAAACGACTGCAGGAGTGGTRCAA |
| | G (p.Tyr1503Cys) | | | AAAGATGCTGGACAAGGCGTTT′] |
| 4780 | NM_004380.2(CREBBP): | 1387 | CREBBP | [′CTCACCTGCTCCTTCTGGACTTCCTRGGGC |
| | 2c.3983 − A > G | | | TGCAGACCACAAGACTGGGAA′] |
| 4781 | NM_001083962.1(TCF4): | 6925 | TCF4 | [′TTTTTTTTTTCTCCTTATTGTTTTARGATCT |
| | 2c.991 − A > G | | | ATTCTCCAGATCACACTAAC′] |
| 4782 | NM_178151.2(DCX): | 1641 | DCX | [′TTAACTTTGTCTCTTCTCTTCTTATRGGACC |
| | c.1027 − 2A > G | | | TGTACCTGCCTCTGTCCTTG′] |
| 4783 | NM_178151.2(DCX): c.607A > G | 1641 | DCX | [′TGTGCGTGTGCTTCTGAACAAGAAGRCAG |
| | (p.Thr203Ala) | | | CCCACTCTTTTGAGCAAGTCCT′] |
| 4784 | NM_178151.2(DCX): c.538A > G | 1641 | DCX | [′GGAGAACAAGGACTTTGTGCGCCCCRAGC |
| | (p.Lys180Glu) | | | TGGTTACCATCATCCGCAGTGG′] |
| 4785 | NM_178151.2(DCX): c.520A > G | 1641 | DCX | [′CAACAGTGCACAGGCCAGGGAGAACRAGG |
| | (p.Lys174Glu) | | | ACTTTGTGCGCCCCAAGCTGGT′] |
| 4786 | NM_178151.2(DCX): c.451A > G | 1641 | DCX | [′CAATCCCAACTGGTCTGTCAACGTADAAA |
| | (p.Lys151Glu) | | | CATCTGCCAATATGAAAGCCCC′] |
| 4787 | NM_178151.2(DCX): c.413A > G | 1641 | DCX | [′GACAACTTCTTTAAAAAGGTGGAGTRCAC |
| | (p.Tyr138Cys) | | | CAAGAATGTCAATCCCAACTGG′] |
| 4788 | NM_000252.2(MTM1): c.301A > G | 4534 | MTM1 | [′AATTGAAAAAATGGGAGGCGCGACARGTA |
| | (p.Ser101Gly) | | | GAGGAGAAAATTCCTATGGTCT′] |
| 4789 | NM_000252.2(MTM1): | 4534 | MTM1 | [′ACTGTCATACTTCTCCTTTGCCCCCRGGAC |
| | c.343 − 2A > G | | | ATGAGAAACCTGAGGTTCGCT′] |
| 4790 | NM_000252.2(MTM1): | 4534 | MTM1 | [′GACTTGAATTTCTTTTTTTCCTCACRGGGCT |
| | c.529 − 2A > G | | | TGCCCAATCACCATTGGAGA′] |
| 4791 | NM_000252.2(MTM1): c.550A > G | 4534 | MTM1 | [′ACAGGGCTTGCCCAATCACCATTGGRGAA |
| | (p.Arg184Gly) | | | TAACTTTTATTAATAAGTGCTA′] |
| 4792 | NM_000252.2(MTM1): c.629A > G | 4534 | MTM1 | [′TTGGTGGTTCCGTATCGTGCCTCAGRTGAT |
| | (p.Asp210Gly) | | | GACCTCCGGAGAGTTGCAACT′] |
| 4793 | NM_000252.2(MTM1): c.1406A > G | 4534 | MTM1 | [′CAATTTTTGATTATAATTTTGGATCRTCTGT |
| | (p.His469Arg) | | | ATAGTTGCCGATTTGGTACT′] |
| 4794 | NM_003159.2(CDKL5): c.62A > G | 6792 | CDKL5 | [′TTTGAGATCCTTGGGGTTGTAGGTGRAGGT |
| | (p.Glu21Gly) | | | AAGTTGGAATTTTTGCGTTCC′] |
| 4795 | NM_006306.3(SMC1A): c.3254A > | 8243 | SMC1A | [′GTGGCTACCAACATTGATGAGATCTRTAA |
| | G (p.Tyr1085Cys) | | | GGCCCTGTCCCGCAATAGCAGT′] |
| 4796 | NM_006306.3(SMC1A): | 8243 | SMC1A | [′CCTGCCACCATTCCCCTGTTTGCACRGGCT |
| | c.616 − 2A > G | | | GACCGGTACCAGCGCCTGAAG′] |
| 4797 | NM_003937.2(KYNU): c.592A > G | 8942 | KYNU | [′GCCTAACTTGATTTAGGGGGAAGAARCCT |
| | (p.Thr198Ala) | | | TAAGAATAGAGGATATCCTTGA′] |
| 4798 | NM_005343.2(HRAS): c.182A > G | −1 | — | [′TTGGACATCCTGGATACCGCCGGCCNGGA |
| | (p.Gln61Arg) | | | GGAGTACAGCGCCATGCGGGAC′] |
| 4799 | NM_012275.2(IL36RN): c.104A > G | 26525 | IL36RN | [′CTAGCTGGAGGGCTGCATGCAGGGARGGT |
| | (p.Lys35Arg) | | | CATTAAAGGTTGGTGATGAAAC′] |
| 4800 | NM_152296.4(ATP1A3): c.2318A > | 478 | ATP1A3 | [′TCCATTGCCTACACCCTGACCAGCADTATC |
| | G (p.Asn773Ser) | | | CCGGAGATCACGCCCTTCCTG′] |
| 4801 | NM_000891.2(KCNJ2): c.953A > G | 3759 | KCNJ2 | [′CAGTGCCGTAGCTCTTATCTAGCAARTGAA |
| | (p.Asn318Ser) | | | ATCCTGTGGGGCCACCGCTAT′] |
| 4802 | NM_017909.3(RMND1): c.713A > G | 55005 | RMND1 | [′TACACTTACAGTTTTGTCTTTCACAYTCCA |
| | (p.Asn238Ser) | | | AAACACAGCAGCTCCTTCCCT′] |
| 4803 | NM_005154.4(USP8): c.2150A > G | 9101 | USP8 | [′GAACCTTCCAAACTGAAGCGCTCCTDCTCC |
| | (p.Tyr717Cys) | | | TCCCCAGATATAACCCAGGCT′] |
| 4804 | NM_014191.3(SCN8A): c.667A > G | 6334 | SCN8A | [′CAATGTTTCAGCTCTACGCACTTTCRGGGT |
| | (p.Arg223Gly) | | | ACTGAGGGCTTTGAAAACTAT′] |
| 4805 | NM_021830.4(C10orf2): c.1754A > | 56652 | C10orf2 | [′CCCCAGGCAAGCCAGGAAGCAGACARTGT |
| | G (p.Asn585Ser) | | | TCTGATCCTGCAGGACAGGAAG′] |
| 4806 | NM_001164405.1(BHLHA9): | 727857 | BHLHA9 | [′GTCCAAGGCGCGGCGCATGGCCGCCRACG |
| | c.211A > G (p.Asn71Asp) | | | TGCGGGAGCGCAAGCGCATCCT′] |
| 4807 | NM_002887.3(RARS): c.5A > G | 5917 | RARS | [′GAGTGAGACGCTGATGGGAGGATGGRCGT |
| | (p.Asp2Gly) | | | ACTGGTGTCTGAGTGCTCCGCG′] |
| 4808 | NM_002887.3(RARS): c.1A > G | 5917 | RARS | [′TGGCGAGTGAGACGCTGATGGGAGGRTGG |
| | (p.Met1Val) | | | ACGTACTGGTGTCTGAGTGCTC′] |
| 4809 | NM_005861.3(STUB1): c.194A > G | 10273 | STUB1 | [′CCGCTGGTGGCCGTGTATTACACCARCCGG |
| | (p.Asn65Ser) | | | GCCTTGTGCTACCTGAAGATG′] |
| 4810 | NM_005211.3(CSF1R): | 1436 | CSF1R | [′ATGGGCATCCTCTGTCCTATCTCCCRGATA |
| | 2c.2655 − A > G | | | CAGCATCATGCAGGCCTGCTG′] |
| 4811 | NM_032228.5(FAR1): c.1094A > G | 84188 | FAR1 | [′CATAAGGCCCCAGCATTCCTGTATGRTATC |
| | (p.Asp365Gly) | | | TACCTCAGGATGACTGGAAGA′] |
| 4812 | NM_020461.3(TUBGCP6): | 85378 | TUBGCP6 | [′GCCATCCCAGGCAGGCGAGTGTTGCYCTG |
| | c.2546A > G (p.Glu849Gly) | | | CAGACCCAGAATCACAGCCTTG′] |
| 4813 | NM_014305.3(TGDS): c.269A > G | 23483 | TGDS | [′TTTGTGAAACTGCTTTTTGAAACAGRGAAA |
| | (p.Glu90Gly) | | | ATAGATATAGTACTACATTTT′] |
| 4814 | NM_014305.3(TGDS): c.892A > G | 23483 | TGDS | [′TCTGTTTTGTTTTCCAAGACCCACCRATGA |
| | (p.Asn298Asp) | | | CATGAGATACCCAATGAAGTC′] |
| 4815 | NM_000118.3(ENG): | 2022 | ENG | [′GCTCGACAGGATATTGACCACCGCCYGCG |
| | c.1273 − 2A > G | | | GGGATAAAGCCAGGGAGCTGGT′] |
| 4816 | NM_005360.4(MAF): c.172A > G | 4094 | MAF | [′CATCGCCGGGGGCTCGCTGTCCTCCRCCCC |
| | (p.Thr58Ala) | | | CATGAGCACGCCGTGCAGCTC′] |
| 4817 | NM_002238.3(KCNH1): c.1399A > | 3756 | KCNH1 | [′ACCTCTAGCACTTCTCTATGCCACCRTCTT |
| | G (p.Ile467Val) | | | CGGGAATGTGACGACTATTTT′] |
| 4818 | NM_172362.2(KCNH1): c.1508A > | 3756 | KCNH1 | [′TTCGGGAATGTGACGACTATTTTCCRACAG |
| | G (p.Gln503Arg) | | | ATGTATGCCAACACCAACAGA′] |
| 4819 | NM_003392.4(WNT5A): c.257A > G | 7474 | WNT5A | [′GGACAGAAGAAACTGTGCCACTTGTRTCA |
| | (p.Tyr86Cys) | | | GGACCACATGCAGTACATCGGA′] |
| 4820 | NM_001199252.2(SGOL1): c.67A > | −1 | — | [′GCCAAGTTTTTATTCCTTTTCTCTTYCATTC |
| | G (p.Lys23Glu) | | | GCTTCTTTATGTCTTCAAGA′] |
| 4821 | NM_000256.3(MYBPC3): | 4607 | MYBPC3 | [′ACTTAGCTACCCACTCTATACCCACRGAAC |
| | c.2906 − 2A > G | | | GGCCACGGCTTCAGCTGCCCA′] |
| 4822 | NM_000256.3(MYBPC3): | 4607 | MYBPC3 | [′GCTCAAGAATGGCCAGGAGATCCAGRTGA |
| | c.1213A > G (p.Met405Val) | | | GCGGCAGGTGCAGCCTGGGGTG′] |
| 4823 | NM_005188.3(CBL): | 867 | CBL | [′TGTTACTATCTTTTGCTTCTTCTGCRGGAAT |
| | c.1228 − 2A > G | | | CAGAAGGTCAGGGCTGTCCT′] |
| 4824 | NM_000257.3(MYH7): c.5326A > G | 4625 | MYH7 | [′TTCTTCATGCGCTCCAGGTGGGCGCYGGTG |
| | (p.Ser1776Gly) | | | TCCTGCTCCTTCTTCAGCTCC′] |
| 4825 | NM_000257.3(MYH7): c.2708A > G | 4625 | MYH7 | [′CAAGACAACCTGGCAGATGCTGAGGRGCG |
| | (p.Glu903Gly) | | | CTGTGATCAGCTGATCAAAAAC′] |
| 4826 | NM_000257.3(MYH7): c.1727A > G | 4625 | MYH7 | [′AATATCAAGGGGAAGCCTGAAGCCCRCTT |
| | (p.His576Arg) | | | CTCCCTGATCCACTATGCCGGC′] |
| 4827 | NM_000257.3(MYH7): c.1496A > G | 4625 | MYH7 | [′CACCACATGTTTGTGCTGGAGCAGGRGGA |
| | (p.Glu499Gly) | | | GTACAAGAAGGAGGGCATCGAG′] |
| 4828 | NM_000257.3(MYH7): c.2539A > G | 4625 | MYH7 | [′GCTGCTGAAGAGTGCAGAAAGAGAGRAGG |
| | (p.Lys847Glu) | | | AGATGGCCTCCATGAAGGAGGA′] |
| 4829 | NM_000257.3(MYH7): c.1954A > G | 4625 | MYH7 | [′CTTTCAGACTGTGTCAGCTCTGCACRGGGT |
| | (p.Arg652Gly) | | | GAGTGGGACACAGCCCCAGCC′] |
| 4830 | NM_000257.3(MYH7): c.1157A > G | 4625 | MYH7 | [′CTTCCAGAGGCTGACAAGTCTGCCTRCCTC |
| | (p.Tyr386Cys) | | | ATGGGGCTGAACTCAGCCGAC′] |
| 4831 | NM_000501.3(ELN): | 2006 | ELN | [′TACATTGCACTGTCCCCATCTCAACRGGTG |
| | c.800 − 2A > G | | | CTGGAGCAGCCGGAGTCCTCC′] |
| 4832 | NM_000117.2(EMD): | 2010 | EMD | [′TCTGCTACCGCTGCCCCCCTTCCCARGGCT |
| | c.266 − 2A > G | | | ACAATGACGACTACTATGAAG′] |
| 4833 | NM_000191.2(HMGCL): c.698A > G | 3155 | HMGCL | [′GTGCCTCTGGCTGCCCTGGCTGTCCRCTGC |
| | (p.His233Arg) | | | CATGACACCTATGGTCAAGCC′] |
| 4834 | NM_207352.3(CYP4V2): c.1393A > | 285440 | CYP4V2 | [′CTACGTGCCCTTCTCTGCTGGCCCCRGGAA |
| | G (p.Arg465Gly) | | | CTGTATAGGTTTGTATCCATC′] |
| 4835 | NM_013382.5(POMT2): | 29954 | POMT2 | [′GTCAGCAGGGTGGTCTCTATTCCACRGGGC |
| | 2c.1726 − A > G | | | CTACGCTTCTCAGGGGTCAAT′] |
| 4836 | NM_000169.2(GLA): | −1 | — | [′TTTGAATTATTTCATTCTTTTTCTCRGTTAG |
| | c.802 − 2A > G | | | TGATTGGCAACTTTGGCCTC′] |
| 4837 | NM_020166.4(MCCC1): | 56922 | MCCC1 | [′GTGTGATTTTCATGGTGTTTTAAACRGGAA |
| | c.137 − 2A > G | | | GAAACATTACCAAGGTCCTCA′] |
| 4838 | NM_006920.4(SCN1A): | 6323 | SCN1A | [′AATATATATTAATCTTTCATTTTCCRGCTG |
| | c.2557 − 2A > G | | | CGAGTTTTCAAGTTGGCAAAA′] |
| 4839 | NM_000501.3(ELN): | 2006 | ELN | [′CCTCACCCTCTGTGGCTGTGTTTTCRGGCG |
| | c.890 − 2A > G | | | TTGGGACTCCAGCTGCAGCTG′] |
| 4840 | NM_006306.3(SMC1A): | 8243 | SMC1A | [′TGACATTGCTGGGCCTGGGGCTTACRGGAT |
| | c.2974 − 2A > G | | | GCCCAGGCTGAGGAAGAGATC′] |
| 4841 | NM_001110792.1(MECP2): | 4204 | MECP2 | [′TGATTTTGACTTCACGGTAACTGGGRGAGG |
| | c.520A > G (p.Arg174Gly) | | | GAGCCCCTCCCGGCGAGAGCA′] |
| 4842 | NM_004646.3(NPHS1): c.1756A > G | 4868 | NPHS1 | [′CTTGTCCTGGGACAAGGAAGGGGAGRGGT |
| | (p.Arg586Gly) | | | GGGAGTGCGAGGGATCCCTCCC′] |
| 4843 | NM_003002.3(SDHD): c.275A > G | 6392 | SDHD | [′TATTTGAATCCTTGCTCTGCGATGGRCTAT |
| | (p.Asp92Gly) | | | TCCCTGGCTGCAGCCCTCACT′] |
| 4844 | NM_004793.3(LONP1): c.2353A > G | 9361 | LONP1 | [′CACGCTGTTTGTGGAGACATCCCTGRGACG |
| | (p.Arg785Gly) | | | GCCACAGGACAAGGATGCCAA′] |
| 4845 | NC_012920.1: m.4279A > G | 4565 | MT-TI | [′TCAAACCTAAGAAATATGTCTGATARAAG |
| | | | | AGTTACTTTGATAGAGTAAATA′] |
| 4846 | NM_005633.3(SOS1): c.1430A > G | 6654 | SOS1 | [′ATTTGCTGTAAATCAAATCATGGGCRGCCA |
| | (p.Gln477Arg) | | | AGACTTCCTGGTGCTAGCAAT′] |
| 4847 | NM_000256.3(MYBPC3): | 4607 | MYBPC3 | [′TGCCACTTCCCTGCGGCCCCCACCCRGGTA |
| | c.1227 − 2A > G | | | CATCTTTGAGTCCATCGGTGC′] |
| 4848 | NM_002834.3(PTPN11): c.661A > G | 5781 | PTPN11 | [′CGATCAGCCCCTTAACACGACTCGTDTAA |
| | (p.Ile221Val) | | | ATGCTGCTGAAATAGAAAGCAG′] |
| 4849 | NM_000257.3(MYH7): c.4664A > G | −1 | — | [′TCCCAGGCCTCCCTGGAGCACGAGGRGGG |
| | (p.Glu1555Gly) | | | CAAGATCCTCCGGGCCCAGCTG′] |
| 4850 | NM_000257.3(MYH7): c.2792A > G | 4625 | MYH7 | [′AACGAGAGGCTGGAGGATGAGGAGGRGA |
| | (p.Glu931Gly) | | | TGAATGCTGAGCTCACTGCCAAG′] |
| 4851 | NM_000257.3(MYH7): c.2087A > G | 4625 | MYH7 | [′CTGGTCATGCACCAGCTGCGCTGCARTGGT |
| | (p.Asn696Ser) | | | GTGCTGGAGGGCATCCGCATC′] |
| 4852 | NM_000257.3(MYH7): c.1805A > G | 4625 | MYH7 | [′CTGCAGAAGAACAAGGATCCTCTCARTGA |
| | (p.Asn602Ser) | | | GACTGTCGTGGGCTTGTATCAG′] |
| 4853 | NM_000257.3(MYH7): c.1615A > G | 4625 | MYH7 | [′CATGTCCATCCTGGAAGAGGAGTGCRTGTT |
| | (p.Met539Val) | | | CCCCAAGGCCACCGACATGAC′] |
| 4854 | NM_000257.3(MYH7): c.1477A > G | 4625 | MYH7 | [′GCTGCAGCAGTTCTTCAACCACCACRTGTT |
| | (p.Met493Val) | | | TGTGCTGGAGCAGGAGGAGTA′] |
| 4855 | NM_000257.3(MYH7): c.1331A > G | 4625 | MYH7 | [′TTCAACTGGATGGTGACGCGCATCAVTGC |
| | (p.Asn444Ser) | | | CACCCTGGAGACCAAGCAGCCA′] |
| 4856 | NM_000257.3(MYH7): c.1315A > G | 4625 | MYH7 | [′AGGGTGGCATTGATGCGCGTCACCAHCCA |
| | (p.Met439Val) | | | GTTGAACATCCTCTCATACACT′] |
| 4857 | NM_000257.3(MYH7): c.1051A > G | 4625 | MYH7 | [′TTCAGAGGAGAAAAACTCCATGTATRAGC |
| | (p.Lys351Glu) | | | TGACAGGCGCCATCATGCACTT′] |
| 4858 | NM_000257.3(MYH7): c.789A > G | 4625 | MYH7 | [′CAGGAAAGTTGGCATCTGCAGACATRGAG |
| | (p.Ile263Met) | | | ACCTGTGAGTGCCATGAATCTG′] |
| 4859 | NM_000257.3(MYH7): c.617A > G | 4625 | MYH7 | [′ATTGCAGCCATTGGGGACCGCAGCARGAA |
| | (p.Lys206Arg) | | | GGACCAGAGCCCGGGCAAGGTA′] |
| 4860 | NM_000363.4(TNNI3): c.616A > G | 7137 | TNNI3 | [′ACTGAGTGGAATGGAGGGCCGCAAGVAAA |
| | (p.Lys206Glu) | | | AGTTTGAGAGCTGAGCCTTCCT′] |
| 4861 | NM_000363.4(TNNI3): c.547A > G | 7137 | TNNI3 | [′GCAGGTGAAGAAGGAGGACACCGAGRAG |
| | (p.Lys183Glu) | | | GTGAGTGTGGGCTAAGGCCAGGA′] |
| 4862 | NM_000169.2(GLA): | −1 | — | [′TGACTCTTTTCCTCCCTCTCATTTCRGGTTC |
| | c.370 − 2A > G | | | ACAGCAAAGGACTGAAGCTA′] |
| 4863 | NM_000051.3(ATM): c.1A > G | 472 | ATM | [′GATGTGTGTTCTGAAATTGTGAACCVTGAG |
| | (p.Met1Val) | | | TCTAGTACTTAATGATCTGCT′] |
| 4864 | NM_000051.3(ATM): | 472 | ATM | [′TATTTAACCACAGTTCTTTTCCCGTRGGCT |
| | c.3154 − 2A > G | | | GATCCTTATTCAAAATGGGCC′] |
| 4865 | NM_024675.3(PALB2): | 79728 | PALB2 | [′AGTTATATACATTTTTTTCCTCCTCRGAAC |
| | c.212 − 2A > G | | | CTAAAAATAAAATATGTGTTT′] |
| 4866 | NM_024675.3(PALB2): | 79728 | PALB2 | [′TTCTGGGGCTGTTTTTGTCTCCTCTRGCGTG |
| | c.109 − 2A > G | | | CCCAAAGAGCTGAAAAGATT′] |
| 4867 | NM_000546.5(TP53): c.709A > G | 7157 | TP53 | [′CTGTACCACCATCCACTACAACTACRTGTG |
| | (p.Met237Val) | | | TAACAGTTCCTGCATGGGCGG′] |
| 4868 | NM_000455.4(STK11): c.889A > G | 6794 | STK11 | [′GATGCTTGAGTACGAACCGGCCAAGRGGT |
| | (p.Arg297Gly) | | | TCTCCATCCGGCAGATCCGGCA′] |
| 4869 | NM_017777.3(MKS1): c.1382A > G | 54903 | MKS1 | [′TCTCTGGAACTGGAGGACCTCTCCTRTGTA |
| | (p.Tyr461Cys) | | | CGGATACCAGGATCCTTCAAG′] |
| 4870 | NM_001231.4(CASQ1): c.731A > G | 844 | CASQ1 | [′ATGGAAGAGCCTGTGACCATCCCAGRCAA |
| | (p.Asp244Gly) | | | GCCCAATAGCGAAGAGGAGATT′] |
| 4871 | NM_001242896.1(DEPDC5): | 9681 | DEPDC5 | [′GTATGAGCAATCATCTGTTGTTTTCRGGAG |
| | c.2355 − 2A > G | | | GGACGAAGATGGTGTGCAGAT′] |
| | (p.Arg785_Gly839del) | | | |
| 4872 | NM_001039550.1(DNAJB2): | 3300 | DNAJB2 | [′TGACCAGTTGCCATGGCATCCTACTRCGAG |
| | c.14A > G (p.Tyr5Cys) | | | ATCCTAGACGTGCCGCGAAGT′] |
| 4873 | NM_007294.3(BRCA1): c.5057A > | 672 | BRCA1 | [′AATCTAATTACTGAAGAGACTACTCRTGTT |
| | G (p.His1686Arg) | | | GTTATGAAAACAGGTATACCA′] |
| 4874 | NM_006888.4(CALM1): c.389A > G | 801 | CALM1 | [′GTAGATGAAATGATCAGAGAAGCAGRTAT |
| | (p.Asp130Gly) | | | TGATGGAGACGGACAAGTCAAC′] |
| 4875 | NM_001082538.2(TCTN1): | 79600 | TCTN1 | [′TTGTATTATTATTTTTTTAATTTTCRGGGGC |
| | c.342 − 2A > G | | | GACAGCCAGTTTTGTAGTCA′] |
| 4876 | NM_003000.2(SDHB): | 6390 | SDHB | [′TCCTGCCTCTCTTTTCTCCCCATACRGGAC |
| | c.541 − 2A > G | | | GGGCTCTACGAGTGCATTCTC′] |
| 4877 | NM_000143.3(FH): c.700A > G | 2271 | FH | [′AGTGGAACAGCATCCTGAGTATGAGYACG |
| | (p.Thr234Ala) | | | TCCAATCTTGATGATCTGTGCA′] |
| 4878 | NM_000038.5(APC): | 324 | APC | [′ATAAAAACTTGTTTCTATTTTATTTRGAGC |
| | c.221 − 2A > G | | | TTAACTTAGATAGCAGTAATT′] |
| 4879 | NM_000314.6(PTEN): c.527A > G | 5728 | PTEN | [′ATTCCCAGTCAGAGGCGCTATGTGTRTTAT |
| | (p.Tyr176Cys) | | | TATAGCTACCTGTTAAAGAAT′] |
| 4880 | NM_030813.5(CLPB): c.1850A > G | 81570 | CLPB | [′CTGGTCGACGGCTACAATGTGCACTRTGGC |
| | (p.Tyr617Cys) | | | GCCCGCTCCATCAAACATGAG′] |
| 4881 | NM_030813.5(CLPB): c.1222A > G | 81570 | CLPB | [′TCCTGGAACTCGGACATGTCCAGCCHGAT |
| | (p.Arg408Gly) | | | GAAGCCCTGTGTGGAAACAAGC′] |
| 4882 | NM_016069.9(PAM16): c.226A > G | −1 | — | [′CTCACCCGTCCCCTCTCCTCTGCAGRACTA |
| | (p.Asn76Asp) | | | TGAACACTTATTTAAGGTGAA′] |
| 4883 | NM_058163.1(TSR2): c.191A > G | 90121 | TSR2 | [′TACTTAGCTGACTTGGAGCTAGATGRGGTG |
| | (p.Glu64Gly) | | | GAAGACTTCCTTGGAGAGCTG′] |
| 4884 | NM_001031.4(RPS28): c.1A > G | 6234 | RPS28 | [′ATAGGCTGCACACGGCTGGTGTCCAYGAT |
| | (p.Met1Val) | | | GGCGGCGCGGCGGCGGTCTGGC′] |
| 4885 | NM_005957.4(MTHFR): c.1114A > | 4524 | MTHFR | [′TCCCATCTTCTGGGCCTCCAGACCARAGAG |
| | G (p.Lys372Glu) | | | TTACATCTACCGTACCCAGGA′] |
| 4886 | NM_014946.3(SPAST): c.1165A > G | 6683 | SPAST | [′CTTTGGTCCACCTGGGAATGGGAAGRCAA |
| | (p.Thr389Ala) | | | TGCTGGTAAGGGTTCTCTTCAA′] |
| 4887 | NM_000228.2(LAMB3): | 3914 | LAMB3 | [′TAAATCCATAAGGTTAAGTTGGACCYACA |
| | 2c.565 − A > G | | | GAGGGAAGGGAAAGAGAAGCGC′] |
| 4888 | NM_000492.3(CFTR): | 1080 | CFTR | [′TCATTTACGTCTTTTGTGCATCTATDGGAG |
| | c.3368 − 2A > G | | | AAGGAGAAGGAAGAGTTGGTA′] |
| 4889 | NM_006785.3(MALT1): | 10892 | MALT1 | [′AACACCCCCTTTCTTTTTTTTTCAARGCGA |
| | c.1019 − 2A > G | | | AGGACAAGGTTGCCCTTTTGA′] |
| 4890 | NM_004771.3(MMP20): c.611A > G | 9313 | MMP20 | [′GGAGAAGGCCTGGGAGGAGATACACRTTT |
| | (p.His204Arg) | | | CGACAATGCTGAGAAGTGGACT′] |
| 4891 | NM_000918.3(P4HB): c.1178A > G | 5034 | P4HB | [′CACCCTAGAACTGCTTTCTTTTCAGRTGCC |
| | (p.Tyr393Cys) | | | CCATGGTGTGGTCACTGCAAA′] |
| 4892 | NM_177405.2(CECR1): c.355A > G | 51816 | CECR1 | [′TGCTCGCATCCCGCAGGCTCACCTGYTTCT |
| | (p.Thr119Ala) | | | CCGGCGTGGAAGAAGTAAGGC′] |
| 4893 | NM_004990.3(MARS): c.1031A > G | 4141 | MARS | [′TACCACATCATCCATGCTGACATCTRCCGC |
| | (p.Tyr344Cys) | | | TGGTTTAACATTTCGTTTGAT′] |
| 4894 | NM_025132.3(WDR19): | 57728 | WDR19 | [′TCTGTATAAAAATAATCTCTTTTTCRGGAA |
| | 2c.407 − A > G | | | AACATACTAAGAGAATCACTT′] |
| 4895 | NM_000314.6(PTEN): c.139A > G | 5728 | PTEN | [′TGCAGAAAGACTTGAAGGCGTATACRGGA |
| | (p.Arg47Gly) | | | ACAATATTGATGATGTAGTAAG′] |
| 4896 | NM_000314.6(PTEN): c.182A > G | 5728 | PTEN | [′GTTTTAAGGTTTTTGGATTCAAAGCDTAAA |
| | (p.His61Arg) | | | AACCATTACAAGATATACAAT′] |
| 4897 | NM_000314.6(PTEN): | 5728 | PTEN | [′TATTCTGAGGTTATCTTTTTACCACRGTTG |
| | c.254 − 2A > G | | | CACAATATCCTTTTGAAGACC′] |
| 4898 | NM_000314.6(PTEN): c.320A > G | 5728 | PTEN | [′GAACTTATCAAACCCTTTTGTGAAGRTCTT |
| | (p.Asp107Gly) | | | GACCAATGGCTAAGTGAAGAT′] |
| 4899 | NM_000314.6(PTEN): c.512A > G | 5728 | PTEN | [′CACCAGGGAGTAACTATTCCCAGTCRGAG |
| | (p.Gln171Arg) | | | GCGCTATGTGTATTATTATAGC′] |
| 4900 | NM_000314.6(PTEN): | 5728 | PTEN | [′TTTTCTTTTCTTTTTTTTTTTTTTTDGGACAA |
| | c.802 − 2A > G | | | AATGTTTCACTTTTGGGTA′] |
| 4901 | NM_001103.3(ACTN2): c.1883A > | 88 | ACTN2 | [′ATCCGCGATCAATCCCTGCAGGAGGRGCT |
| | G (p.Glu628Gly) | | | GGCTCGCCAGCATGCTAACGAG′] |
| 4902 | NM_003159.2(CDKL5): | 6792 | CDKL5 | [′GCTTTTAATTGTGTTTGTTTTTTTCRGGGAG |
| | c.−162 − 2A > G | | | TCATTTAATACTTCATGATT′] |
| 4903 | NM_003159.2(CDKL5): c.91A > G | 6792 | CDKL5 | [′AGCCTATGGAGTTGTACTTAAATGCRGAC |
| | (p.Arg31Gly) | | | ACAAGGCAAGTACATTATTTTT′] |
| 4904 | NM_003159.2(CDKL5): c.458A > G | 6792 | CDKL5 | [′CACAATGATGTCCTAAAACTGTGTGRCTTT |
| | (p.Asp153Gly) | | | GGTAAGTTAAAAAGAAATTAA′] |
| 4905 | NM_003159.2(CDKL5): | 6792 | CDKL5 | [′ATATGATAAAAATGTCTTCTCATTTRGGAA |
| | c.2277 − 2A > G | | | AAGTCCTGAAAATATTAGTCA′] |
| 4906 | NM_021098.2(CACNA1H): | 8912 | CACNA1H | [′CATCGTCAGCTTCTTCGTGCTCAACRTGTT |
| | c.4645A > G (p.Met1549Val) | | | CGTGGGCGTCGTGGTCGAGAA′] |
| 4907 | NM_003816.2(ADAM9): | 8754 | ADAM9 | [′TGTTTAATTTGAATTCTATTTCACTRGTTCC |
| | c.1396 − 2A > G | | | TTCCAGGAGGTACTTTATGC′] |
| 4908 | NM_212472.2(PRKAR1A): | 5573 | PRKAR1A | [′AATACTTTGAGAGGTTGGAGAAGGTRAAA |
| | c.177 +3 A > G | | | ATAAATGTGGGGAGATGATGAG′] |
| 4909 | NM_001204830.1(LIPT1): c.535A > | −1 | — | [′CCGGACTACTGCCTATCACCATTGCRCTTT |
| | G (p.Thr179Ala) | | | ATTATGTAGTACTGATGGGAC′] |
| 4910 | NM_001165963.1(SCN1A): | −1 | — | [′AACCCTGGAAGCTCAGTTAAGGGAGRCTG |
| | c.5264A > G (p.Asp1755Gly) | | | TGGGAACCCATCTGTTGGAATT′] |
| 4911 | NM_001165963.1(SCN1A): | −1 | — | [′TAATTGTTATTATTTTTGTGTGTGCRGGTTT |
| | c.3880 − 2A > G | | | CATTGGTCAGTTTAACAGCA′] |
| 4912 | NM_001165963.1(SCNIA): | 6323 | SCN1A | [′TTTATTGTGACGCTTAGCCTGGTAGRACTT |
| | c.2537A > G (p.Glu846Gly) | | | GGACTCGCCAATGTGGAAGGA′] |
| 4913 | NM_001165963.1(SCNIA): | 6323 | SCN1A | [′GTCATTGGATAGTGCTCCATGGCCAHGAA |
| | c.2353A > G (p.Met785Val) | | | AAGAGTATTTAAGACAATACAG′] |
| 4914 | NM_001165963.1(SCN1A): | 6323 | SCN1A | [′AGAGGTACTCCTCCCCACACCAGGTRTGG |
| | c.1662 + 3A > G | | | CACTGCTGAGTTTACTGATGCA′] |
| 4915 | NM_001165963.1(SCN1A): | 6323 | SCN1A | [′TGTGTGAAAGCTGGTAGAAATCCCADTTA |
| | c.1076A > G (p.Asn359Ser) | | | TGGCTACACAAGCTTTGATACC′] |
| 4916 | NM_001165963.1(SCN1A): | 6323 | SCN1A | [′TTGCAGCCAATGTCCAGAGGGATATRTGT |
| | c.1048A > G (p.Met350Val) | | | GTGTGAAAGCTGGTAGAAATCC′] |
| 4917 | NM_001165963.1(SCN1A): | 6323 | SCN1A | [′ACTTGCAGCCAATGTCCAGAGGGATRTAT |
| | c.1046A > G (p.Tyr349Cys) | | | GTGTGTGAAAGCTGGTAGAAAT′] |
| 4918 | NM_001165963.1(SCN1A): | 6323 | SCN1A | [′CACTATTTTGACAAACTGTGTGTTTRTGAC |
| | c.433A > G (p.Met145Val) | | | AATGAGTAACCCTCCTGATTG′] |
| 4919 | NM_001165963.1(SCN1A): | 6323 | SCN1A | [′TAGCTATTAAGATTTTGGTACATTCRTATC |
| | c.383 + 1A > G | | | CTTTTTCAAGTGATTAATATT′] |
| 4920 | NM_001605.2(AARS): c.2251A > G | 16 | AARS | [′TCGGCACCTGTGACAGCCACAATCCYCCG |
| | (p.Arg751Gly) | | | GATACCCTTGGCAATGGCTTCT′] |
| 4921 | NM_000124.3(ERCC6): | 2074 | ERCC6 | [′TATTCTCCATGCTCGCTCCCGGGCCYGCAA |
| | c.2830 − 2A > G | | | CAGAGAGAGAGAGACCTCTCA′] |
| 4922 | NM_000124.3(ERCC6): | 2074 | ERCC6 | [′ACTGGGAATGTGTATTTGCTTTGCAVACTC |
| | c.2599 − 26A > G | | | CTATCCCCCACCTCCAAACAG′] |
| 4923 | NM_001110556.1(FLNA): | 2316 | FLNA | [′ACTGAGGGGACTGGTGGCTGTTGTCRGGC |
| | c.1829 − 2A > G | | | TTCTCGGTGGAAGGGCCATCGC′] |
| 4924 | NM_006129.4(BMP1): c.808A > G | 649 | BMP1 | [′GGAGACCTATGACTTCGACAGCATCRTGC |
| | (p.Met270Val) | | | ATTACGCTCGGAACACATTCTC′] |
| 4925 | NM_001987.4(ETV6): c.1252A > G | 2120 | ETV6 | [′GGAGCCAGGACAAAGGCTTTTGTTCRGGT |
| | (p.Arg418Gly) | | | AGCACTTCCTTTTTCTCCTTTC′] |
| 4926 | NM_014423.3(AFF4): c.760A > G | 27125 | AFF4 | [′GTCCAATTCAATGTTACAGAAACCCRCTGC |
| | (p.Thr254Ala) | | | CTATGTGCGGCCCATGGACGG′] |
| 4927 | NM_002055.4(GFAP): c.1085A > G | 2670 | GFAP | [′AATGTCAAGCTGGCCCTGGACATCGRGAT |
| | (p.Glu362Gly) | | | CGCCACCTACAGGAAGCTGCTA′] |
| 4928 | NM_002055.4(GFAP): c.256A > G | 2670 | GFAP | [′TGACCGCTTTGCCAGCTACATCGAGRAGGT |
| | (p.Lys86Glu) | | | TCGCTTCCTGGAACAGCAAAA′] |
| 4929 | NM_006017.2(PROM1): | 8842 | PROM1 | [′ATTTGCTGTTCTTCACAGCTTTAGGRTATG |
| | c.2077 − 521A > G | | | TATCCAATGTTTTCTTCAGGT′] |
| 4930 | NM_002755.3(MAP2K1): c.305A > | 5604 | MAP2K1 | [′ACCTTTCTCCAGCTAATTCATCTGGRGATC |
| | G (p.Glu102Gly) | | | AAACCCGCAATCCGGAACCAG′] |
| 4931 | NM_001288953.1(TTC7A): | 57217 | TTC7A | [′CGTCCCCACAGCCTGATGTTCACCARGGTG |
| | Ac.1715 > G (p.Lys572Arg) | | | AAGCTGGAGCAGGTGCTGAAA′] |
| 4932 | NM_016218.2(POLK): c.181A > G | 51426 | POLK | [′TGAGCTCAAGAAAGAAAAGCAAGTCRACC |
| | (p.Asn61Asp) | | | AACGAATTGAAAATATGATGCA′] |
| 4933 | NM_016218.2(POLK): c.1385A > G | 51426 | POLK | [′AGAACTGTTACCATTAAGTTGAAGARTGT |
| | (p.Asn462Ser) | | | GAATTTTGAAGTAAAAACTCGT′] |
| 4934 | NM_016218.2(POLK): c.1477A > G | 51426 | POLK | [′ATTTGCCATTGCTAAGGAATTGCTARAAAC |
| | (p.Lys493Glu) | | | AGAAATTGATGCTGATTTTCC′] |
| 4935 | NM_001040431.2(COA3): c.215A > | 28958 | COA3 | [′GGAAATCGAGTAGAAGGTGTAACCAYCTG |
| | G (p.Tyr72Cys) | | | GGGAGGTAGGTTCAGGAAACCA′] |
| 4936 | NM_000891.2(KCNJ2): c.901A > G | 3759 | KCNJ2 | [′TGAAATCGTGGTCATACTGGAAGGCRTGG |
| | (p.Met301Val) | | | TGGAAGCCACTGCCATGACGAC′] |
| 4937 | NM_144499.2(GNAT1): c.386A > G | 2779 | GNAT1 | [′GACATCATCCAGCGGCTGTGGAAGGRCTC |
| | (p.Asp129Gly) | | | CGGTATCCAGGCCTGTTTTGAG′] |
| 4938 | NM_018965.3(TREM2): c.113A > G | 54209 | TREM2 | [′CAGTCCCTGCAGGTGTCTTGCCCCTRTGAC |
| | (p.Tyr38Cys) | | | TCCATGAAGCACTGGGGGAGG′] |
| 4939 | NM_194277.2(FRMD7): c.556A > G | 90167 | FRMD7 | [′ACTGGACATAGCAAGGAAGCTGGATRTGT |
| | (p.Met186Val) | | | ATGGCATCAGGCCTCACCCCGC′] |
| 4940 | NM_001003811.1(TEX11): | 56159 | TEX11 | [′TCACTCTCAACAGTAATCTTCTCCAYGGTC |
| | c.511A > G (p.Met171Val) | | | AAGTCAGCCTCAGGGGAGCTC′] |
| 4941 | NM_000921.4(PDE3A): c.1333A > G | 5139 | PDE3A | [′AGTTTCTTCCACTTGGACCACCACCRCCTC |
| | (p.Thr445Ala) | | | GGCCACAGGTCTACCCACCTT′] |
| 4942 | NM_000033.3(ABCD1): c.887A > G | 215 | ABCD1 | [′GCCAACTCGGAGGAGATCGCCTTCTRTGG |
| | (p.Tyr296Cys) | | | GGGCCATGAGGTGGGGCAGGTT′] |
| 4943 | NM_000169.2(GLA): c.137A > G | −1 | — | [′AGGACGCCTACCATGGGCTGGCTGCDCTG |
| | (p.His46Arg) | | | GGAGCGCTTCATGTGCAACCTT′] |
| 4944 | NM_000033.3(ABCD1): | 215 | ABCD1 | [′CCCTGACCCTGTCCCTCTCCTGGCCRGGAA |
| | c.1992 − 2A > G | | | ATACCACACACACTTGCTACA′] |
| 4945 | NM_000182.4(HADHA): | 3030 | HADHA | [′TTGCTCAATTCCAGTCTTTACCACCYAAAA |
| | c.919 − 2A > G | | | AACATATAAAGCACTTGCTCA′] |
| 4946 | NM_000159.3(GCDH): c.1213A > G | 2639 | GCDH | [′CGAGTATCACGTGATCCGGCACGCCRTGA |
| | (p.Met405Val) | | | ACCTGGAGGCCGTGAACACCTA′] |
| 4947 | NM_004006.2(DMD): | 1756 | DMD | [′ACAATTGTTAACTTCCTTCTTTGTCRGGGG |
| | c.1150 − 2A > G | | | TACATGATGGATTTGACAGCC′] |
| 4948 | NM_019109.4(ALG1): | 56052 | ALG | [′CTCAGGCTCCCTTGGTTCTCTCTGCRGTTT |
| | c.1188 − 2A > G | | | ACATGAGCTGGTGAAACATGA′] |
| 4949 | NM_004463.2(FGD1): | 2245 | FGD1 | [′TCTTTCTTTTTTATTCCCCACCCCARGGACT |
| | c.2016 − 2A > G | | | GAGGAGGAGAAGAAAGACTG′] |
| 4950 | NM_198525.2(KIF7): c.2981A > G | 374654 | KIF7 | [′CTGCTGCTGGCTCTGGGCGCTGCCCYGCCG |
| | (p.Gln994Arg) | | | CAGCTGCCCGCTCTTCTCGGA′] |
| 4951 | NM_020366.3(RPGRIP1): | 57096 | RPGRIP1 | [′ATGCTGTTTTTTTCCCTTTCCCAACRGTTGT |
| | c.3749 − 2A > G | | | TAGCCCTGAAGATCTGGCTA′] |
| 4952 | NM_003494.3(DYSF): c.3041A > G | 8291 | DYSF | [′GTTCCCCCTCCCCCAGGCTGGGAGTRTAGC |
| | (p.Tyr1014Cys) | | | ATCACCATCCCCCCGGAGCGG′] |
| 4953 | NM_003494.3(DYSF): | 8291 | DYSF | [′CTGCCATAACCAGCTTCGTGTCTCCRGGGC |
| | c.3349 − 2A > G | | | GGCGTGATGGATGACAAGAGT′] |
| 4954 | NM_004006.2(DMD): | 1756 | DMD | [′ATTACATTTCATTATAATTCTTTTCRGGTA |
| | c.4675 − 2A > G | | | ACAGAAAGAAAGCAACAGTTG′] |
| 4955 | NM_000169.2(GLA): c.620A > G | −1 | — | [′GTGTACTCCTGTGAGTGGCCTCTTTRTATG |
| | (p.Tyr207Cys) | | | TGGCCCTTTCAAAAGGTGAGA′] |
| 4956 | NM_022124.5(CDH23): | −1 | — | [′CTCTGCTCTCTCCCTTGGCTACTCCRGGTTC |
| | c.146 − 2A > G | | | TTCTGTGACCCAGTTGCTGG′] |
| 4957 | NM_000169.2(GLA): | −1 | — | [′GGGGTTGGAATGACCCAGATATGGTRAAA |
| | c.801 + 3A > G | | | ACTTGAGCCCTCCTTGTTCAAG′] |
| 4958 | NM_000019.3(ACAT1): c.473A > G | 38 | ACAT1 | [′GCAGGTGGGATGGAGAGCATGTCCARTGT |
| | (p.Asn158Ser) | | | TCCATATGTAATGAACAGAGGA′] |
| 4959 | NM_000553.4(WRN): c.561A > G | 7486 | WRN | [′GTCTGGTTAAACACCTCTTAGGTAARCAGC |
| | (p.Lys187=) | | | TCCTGAAAGACAAGTCTATCC′] |
| 4960 | NM_000050.4(ASS1): | 445 | ASS1 | [′GGCTCTGACCCCTTGTCCTATGTCCDGGTC |
| | c.421 − 2A > G | | | ATTGCTCCCTGGAGGATGCCT′] |
| 4961 | NM_020166.4(MCCC1): | 56922 | MCCC1 | [′TTCTGATCTAACAATCCTCATTCCCYAAGA |
| | c.640 − 2A > G | | | GAGAAAAGATGATTATGACTA′] |
| 4962 | NM_004006.2(DMD): | 1756 | DMD | [′TCTTTTTTACTTTTTTGATGCCAATRGGAAT |
| | c.10554 − 2A > G | | | CTGCAAGCAGAATATGACCG′] |
| 4963 | NM_017653.3(DYM): | 54808 | DYM | [′ACAAGTTTGCTGGTGTATGGAAGACYATA |
| | c.621 − 2A > G | | | CAAAAAGGAAAAAAAAATCAAA′] |
| 4964 | NM_001098398.1(COPA): c.728A > | −1 | — | [′TCAGAATCAAAGGCATGGGAGGTTGRTAC |
| | G (p.Asp243Gly) | | | CTGCCGGGGCCATTACAACAAT′] |
| 4965 | NM_005045.3(RELN): c.2288A > G | 5649 | RELN | [′CGTCAGCTAATTACATCTTTCCTTGRCAGC |
| | (p.Asp763Gly) | | | TCACAATCCAGGTGAGTGAAG′] |
| 4966 | NM_207111.3(RNF216): c.1616A > | 54476 | RNF216 | [′TGCCATCTCTTTGATTTTCTGCTCAHAGAA |
| | G (p.Tyr539Cys) | | | CTCCTGCTCTTGTTGCACAGC′] |
| 4967 | NM_001035.2(RYR2): c.568A > G | 6262 | RYR2 | [′CATCTTAGTTAGCGTGTCCTCTGAARGGTA |
| | (p.Arg190Gly) | | | CTTGGTAAGTGTGGAAAGTAG′] |
| 4968 | NM_001035.2(RYR2): c.11965A > G | 6262 | RYR2 | [′AAATGCAACTGCTTTACCACCAGGTVATGT |
| | (p.Asn3989Asp) | | | TGTTAATGGAACGATTGGCAA′] |
| 4969 | NM_001035.2(RYR2): c.12290A > G | 6262 | RYR2 | [′GAACCTGCGAAGGACATCGGCTTCARCGT |
| | (p.Asn4097Ser) | | | CGCCGTCCTTCTGACAAACCTC′] |
| 4970 | NM_001035.2(RYR2): c.12533A > G | 6262 | RYR2 | [′AGACAGTTCATATTTGACGTGGTCARCGA |
| | (p.Asn4178Ser) | | | AGGCGGAGAGAAAGAGAAGATG′] |
| 4971 | NM_000090.3(COL3A1): | 1281 | COL3A1 | [′ACAGTGACATGGCTTCTCTTTTTCCRGGGT |
| | c.2338 − 2A > G | | | GAAGGTGGTGCCCCCGGACTT′] |
| 4972 | NM_198056.2(SCN5A): c.4462A > G | 6331 | SCN5A | [′CTTAGGGGGCCAGGACATCTTCATGRCAG |
| | (p.Thr1488Ala) | | | AGGAGCAGAAGAAGTACTACAA′] |
| 4973 | NM_198056.2(SCN5A): c.4453A > G | 6331 | SCN5A | [′CTCTTTGCACTTAGGGGGCCAGGACRTCTT |
| | (p.Ile1485Val) | | | CATGACAGAGGAGCAGAAGAA′] |
| 4974 | NM_198056.2(SCN5A): | 6331 | SCN5A | [′GGTGAGCCTGACCCATTATCTCGACRGGTC |
| | c.2788 − 2A > G | | | CTGAATCTCTTCCTGGCCTTG′] |
| 4975 | NM_198056.2(SCN5A): c.1247A > G | 6331 | SCN5A | [′GATGGTGGCTTGGTTTTGCTCCTCAYAGGC |
| | (p.Tyr416Cys) | | | CATTGCGACCACGGCCAGGAT′] |
| 4976 | NM_004415.2(DSP): | 1832 | DSP | [′TTCACTGATCACTCTCATCCTTCACRGTTTT |
| | c.1141 − 2A > G | | | TTGAAGAGGCGCAGTCTACT′] |
| 4977 | NM_000238.3(KCNH2): c.2582A > | 3757 | KCNH2 | [′TGGTCCAGCCTGGAGATCACCTTCANCCTG |
| | G (p.Asn861Ser) | | | CGAGATGTGAGTTGGCTGCCC′] |
| 4978 | NM_000238.3(KCNH2): c.1913A > | 3757 | KCNH2 | [′GTCTCTCCCAACACCAACTCAGAGARGAT |
| | G (p.Lys638Arg) | | | CTTCTCCATCTGCGTCATGCTC′] |
| 4979 | NM_000238.3(KCNH2): c.1904A > | 3757 | KCNH2 | [′TTCGGCAACGTCTCTCCCAACACCADCTCA |
| | G (p.Asn635Ser) | | | GAGAAGATCTTCTCCATCTGC′] |
| 4980 | NM_000238.3(KCNH2): c.1900A > | 3757 | KCNH2 | [′GGGCTTCGGCAACGTCTCTCCCAACRCCAA |
| | G (p.Thr634Ala) | | | CTCAGAGAAGATCTTCTCCAT′] |
| 4981 | NM_000238.3(KCNH2): | 3757 | KCNH2 | [′CCACACCTCCGCCTTCCCCGGGTGCRGGTC |
| | c.1129 − 2A > G | | | CTGTCCCTGGGCGCCGACGTG′] |
| 4982 | NM_000238.3(KCNH2): c.296A > G | 3757 | KCNH2 | [′GAGCGCAAAGTGGAAATCGCCTTCTVCCG |
| | (p.Tyr99Cys) | | | GAAAGATGGTAGGAGCGGGCCG′] |
| 4983 | NM_000238.3(KCNH2): c.133A > G | 3757 | KCNH2 | [′GGAGAACTGCGCCGTCATCTACTGCDACG |
| | (p.Asn45Asp) | | | ACGGCTTCTGCGAGCTGTGCGG′] |
| 4984 | NM_001613.2(ACTA2): c.1A > G | 59 | ACTA2 | [′AGAATCCTGTGAAGCAGCTCCAGCTRTGT |
| | (p.Met1Val) | | | GTGAAGAAGAGGACAGCACTGC′] |
| 4985 | NM_000218.2(KCNQ1): c.605A > G | 3784 | KCNQ1 | [′GCTCCCCCTCTCCTGCACTCCACAGRCCTC |
| | (p.Asp202Gly) | | | ATCGTGGTCGTGGCCTCCATG′] |
| 4986 | NM_000218.2(KCNQ1): | 3784 | KCNQ1 | [′GGGAGCCTCCTGTCCATTCCTTCCCVGGGG |
| | c.1033 − 2A > G | | | ATTCTTGGCTCGGGGTTTGCC′] |
| 4987 | NM_000218.2(KCNQ1): | 3784 | KCNQ1 | [′CAATCTCCTCTCCTCTCTCCACTGCRGGCT |
| | c.1515 − 2A > G | | | GCGGGAACACCATCGGGCCAC′] |
| 4988 | NM_000218.2(KCNQ1): c.1787A > | 3784 | KCNQ1 | [′ATCGGCGCCCGCCTGAACCGAGTAGRAGA |
| | G (p.Glu596Gly) | | | CAAGGTAGGCTCACGCGCCGGC′] |
| 4989 | NM_000138.4(FBN1): c.7916A > G | 2200 | FBN1 | [′TGCATGTGTCCCGCCGGCTTCCAGTRTGAA |
| | (p.Tyr2639Cys) | | | CAGTTCAGTGGAGGATGCCAA′] |
| 4990 | NM_000138.4(FBN1) | 2200 | FBN1 | [′TTTTGCTTTTTTCTCCCTCCCCCCARGATAT |
| | c.4337 − 2A > G | | | TGATGAGTGCTCCCTTCCGA′] |
| 4991 | NM_000138.4(FBN1): c.3344A > G | 2200 | FBN1 | [′GGTCATTTCCATTTTGCAGATATTGRTGAG |
| | (p.Asp1115Gly) | | | TGTCAGAGAGATCCTCTCCTA′] |
| 4992 | NM_001943.3(DSG2): c.880A > G | 1829 | DSG2 | [′AGTCAACGTAGAAGTTACGCGCATARAAG |
| | (p.Lys294Glu) | | | TGTTCGATGCAGATGAAATAGG′] |
| 4993 | NM_001927.3(DES): c.1324A > G | 1674 | DES | [′TGAGCAAAGGGGTTCTGAGGTCCATRCCA |
| | (p.Thr442Ala) | | | AGAAGACGGTGATGATCAAGAC′] |
| 4994 | NM_004572.3(PKP2): | 5318 | PKP2 | [′AGAAATATGCATCTGCTTCTTCCCCRGGTT |
| | c.1171 − 2A > G | | | AACCAGCTTCGTGGCATCCTC′] |
| 4995 | NM_001256850.1(TTN): | −1 | — | [′GATATGAATATTTCACTCTTTTCTCRGGTC |
| | c.45629 − 2A > G | | | CTCCCTCACCACCCCTTGACC′] |
| 4996 | NM_013254.3(TBK1): c.1201A > G | 29110 | TBK1 | [′ACTTCATATTTCAGTTTCCCTCCCTRAAGT |
| | (p.Lys401Glu) | | | ACATCCACGTTATGATTTAGA′] |
| 4997 | NM_030973.3(MED25): c.116A > G | 81857 | MED25 | [′TACTTCGAGGGGCTCCGCAAGCACTRCCTG |
| | (p.Tyr39Cys) | | | CTCCCGGCCATCGAGTGAGTG′] |
| 4998 | NM_145207.2(SPATA5): c.1883A > | 166378 | SPATA5 | [′TCTATTTTTCAGGTATCCTGGTCAGRTATA |
| | G (p.Asp628Gly) | | | GGAGGACTGGAAAGTATCAAA′] |
| 4999 | NM_000016.5(ACADM): c.329A > | 34 | ACADM | [′ACTTTTGATGCTTGTTTAATTAGTGRAGAA |
| | G (p.Glu110Gly) | | | TTGGCTTATGGATGTACAGGG′] |
| 5000 | NM_000016.5(ACADM): c.797A > | 34 | ACADM | [′CCTAAAGAAAATGTTTTAATTGGTGRCGG |
| | G (p.Asp266Gly) | | | AGCTGGTTTCAAAGTTGCAATG′] |
| 5001 | NM_000532.4(PCCB): | 5096 | PCCB | [′GACTGTTCTGGAAATCTTTTATTTCRGGAC |
| | c.655 − 2A > G | | | ACCTCCTACCTGTTCATCACT′] |
| 5002 | NM_004453.3(ETFDH): c.929A > G | 2110 | ETFDH | [′CATACCTATGGAGGATCTTTCCTCTRTCAT |
| | (p.Tyr310Cys) | | | TTGAATGAAGGTGAACCCCTA′] |
| 5003 | NM_000255.3(MUT): c.1885A > G | 4594 | MUT | [′AAAAATGGGACAAGATGGCCATGACRGAG |
| | (p.Arg629Gly) | | | GAGCAAAAGTTATTGCTACAGG′] |
| 5004 | NM_000255.3(MUT): c.329A > G | 4594 | MUT | [′TTTAGGCCCTGGACCATCCGCCAGTRTGCT |
| | (p.Tyr110Cys) | | | GGTTTTAGTACTGTGGAAGAA′] |
| 5005 | NM_000017.3(ACADS): c.1108A > | 35 | ACADS | [′TCAGGCCATCCAGATCCTGGGCGGCRTGG |
| | G (p.Met370Val) | | | GCTACGTGACAGAGATGCCGGC′] |
| 5006 | NM_174917.4(ACSF3): c.1A > G | 197322 | ACSF3 | [′TCCAGCTCGGCCGCCTGTCAGTGCARTGCT |
| | (p.Met1Val) | | | GCCCCATGTGGTGCTCACCTT′] |
| 5007 | NM_000531.5(OTC): c.919A > G | 5009 | OTC | [′GACATTTTTACACTGCTTGCCCAGARAGCC |
| | (p.Lys307Glu) | | | AGAAGAAGTGGATGATGAAGT′] |
| 5008 | NM_000030.2(AGXT): c.248A > G | 189 | AGXT | [′ACACTGGTCATCTCTGGCTCGGGACRCTGT |
| | (p.His83Arg) | | | GCCCTGGAGGCCGCCCTGGTC′] |
| 5009 | NM_000030.2(AGXT): | 189 | AGXT | [′CACCCACAGCCGTCCCTGCTTCCTCRGGGC |
| | c.424 − 2A > G | | | CTGGCCCAGCACAAGCCAGTG′] |
| | (p.Gly_142Gln145del) | | | |
| 5010 | NM_000030.2(AGXT): | 189 | AGXT | [′CGTCCCGAGCAAACCACCCATCTACRGGC |
| | c.596 − 2A > G | | | ATCGACATCCTGTACTCGGGCT′] |
| 5011 | NM_000030.2(AGXT): | 189 | AGXT | [′TGGACCAAGCCCCCTCGTGTCTTCCRGGTA |
| | c.777 − 2A > G | | | CCATCACACAATCCCCGTCAT′] |
| 5012 | NM_012203.1(GRHPR): | 9380 | GRHPR | [′CTCCTGAGGGCCTCCCTTTCCCCGCRGCTG |
| | c.84 − 2A > G | | | TGAGGTGGAGCAGTGGGACTC′] |
| 5013 | NM_012203.1(GRHPR): c.934A > G | 9380 | GRHPR | [′CACCATGTCCTTGTTGGCAGCTAACRACTT |
| | (p.Asn312Asp) | | | GCTGGCTGGCCTGAGAGGGGA′] |
| 5014 | NM_203290.2(POLRIC): c.221A > | 9533 | POLRIC | [′GTGGGAATTGACGCAGCCATTGCCARTGC |
| | G (p.Asn74Ser) | | | TTTTCGACGAATTCTGCTAGCT′] |
| 5015 | NM_006516.2(SLC2A1): c.848A > G | 6513 | SLC2A1 | [′GCTGTGGTGCTGCAGCTGTCCCAGCRGCTG |
| | (p.Gln283Arg) | | | TCTGGCATCAACGCTGTGAGT′] |
| 5016 | NM_006516.2(SLC2A1): | 6513 | SLC2A1 | [′ATAACAGTGTGGTTTGTTTCTCCGCRGAAG |
| | c.19 − 2A > G | | | CTGACGGGTCGCCTCATGCTG′] |
| 5017 | NM_021007.2(SCN2A): | 6326 | SCN2A | [′ACTTTGTCTTCCTTGACGATATTCTRCTTTA |
| | c.387 − 2A > G | | | TTCAATATGCTCATTATGTG′] |
| 5018 | NM_021007.2(SCN2A): c.851A > G | 6326 | SCN2A | [′AATAAATGTTTGCAATGGCCTCCAGRTAAT |
| | (p.Asp284Gly) | | | TCTTCCTTTGAAATAAATATC′] |
| 5019 | NM_021007.2(SCN2A): c.4036A > G | 6326 | SCN2A | [′CATGAATGTACTTCTGGTTTGTCTGRTCTTT |
| | (p.Ile1346Val) | | | TGGCTAATATTCAGTATCAT′] |
| 5020 | NM_001165963.1(SCN1A): | −1 | — | [′TAATTTCAACCAGCAGAAAAAGAAGDTAA |
| | c.4476 + 1A > G | | | GTATTTCTAATATTTTCTCTCC′] |
| 5021 | NM_001165963.1(SCN1A): | 6323 | SCN1A | [′ATCCTGGCTGTGGTGGCCATGGCCTRCGAG |
| | c.1277A > G (p.Tyr426Cys) | | | GAACAGAATCAGGCCACCTTG′] |
| 5022 | NM_000391.3(TPP1): c.833A > G | 1200 | TPP1 | [′GGGATTGAGGCCAGTCTAGATGTGCRGTA |
| | (p.Gln278Arg) | | | CCTGATGAGTGCTGGTGCCAAC′] |
| 5023 | NM_017882.2(CLN6): c.767A > G | 54982 | CLN6 | [′GGAGAAGAGGAAGAGGCCGTTGCTGYCCA |
| | (p.Asp256Gly) | | | GGAAGAGGCGCTTGCGCTTCTG′] |
| 5024 | NM_002693.2(POLG): c.3470A > G | 5428 | POLG | [′GGGCCCCGCATACCTGGTCAAGAGGYTGG |
| | (p.Asn1157Ser) | | | TGATCTGCAAGGCCAGGGCAGC′] |
| 5025 | NM_002693.2(POLG): c.2840A > G | 5428 | POLG | [′GTGGGCATCAGCCGTGAGCATGCCARAAT |
| | (p.Lys947Arg) | | | CTTCAACTACGGCCGCATCTAT′] |
| 5026 | NM_002693.2(POLG): c.2636A > G | 5428 | POLG | [′CACAAGGGTGTAGCCAGGTGGGGCCYGCA |
| | (p.Gln879Arg) | | | CCATGGCTTTCAACTCACTGCC′] |
| 5027 | NM_000833.4(GRIN2A): c.2449A > | 2903 | GRIN2A | [′GAGCAGCCAGCTGGACATTGACAACRTGG |
| | G (p.Met817Val) | | | CGGGCGTATTCTACATGCTGGC′] |
| 5028 | NM_000833.4(GRIN2A): c.1930A > | 2903 | GRIN2A | [′CTTCTTCGCTGTCATATTCCTGGCTRGCTA |
| | G (p.Ser644Gly) | | | CACAGCCAATCTGGCTGCCTT′] |
| 5029 | NM_000156.5(GAMT): c.1A > G | 2593 | GAMT | [′GTCGGGTCGCCGTCCAGCCTGCAGCRTGA |
| | (p.Met1Val) | | | GCGCCCCCAGCGCGACCCCCAT′] |
| 5030 | NM_172107.2(KCNQ2): c.848A > G | 3785 | KCNQ2 | [′CTGACCACCATTGGCTACGGGGACARGTA |
| | (p.Lys283Arg) | | | CCCCCAGACCTGGAACGGCAGG′] |
| 5031 | NM_172107.2(KCNQ2): c.611A > G | 3785 | KCNQ2 | [′GCGCTCCGGAGCCTGCGCTTCCTGCRGATT |
| | (p.Gln204Arg) | | | CTGCGGATGATCCGCATGGAC′] |
| 5032 | NM_172107.2(KCNQ2): | 3785 | KCNQ2 | [′CTGAGAGCGCGCGTTCCCTGCCCCCRGGTT |
| | c.297 − 2A > G | | | CCTCCTGGTTTTCTCCTGCCT′] |
| 5033 | NM_001105243.1(PCDH19): | 57526 | PCDH19 | [′GTCACCGTCAGCGTGCTGGACACCARTGA |
| | c.1019A > G (p.Asn340Ser) | | | CAATCCGCCGGTCATCAACCTG′] |
| 5034 | NM_001105243.1(PCDH19): | 57526 | PCDH19 | [′CTTAGTATCAAGGTGACCGACTCCADTGA |
| | c.695A > G (p.Asn232Ser) | | | CAACAACCCGGTGTTTAGCGAG′] |
| 5035 | NM_052859.3(RFT1): c.454A > G | 91869 | RFT1 | [′TTCACAGCAGAAGGTGCACTGACCTBGAG |
| | (p.Lys152Glu) | | | CTTCACAAACATATGTGCTTGT′] |
| 5036 | NM_052859.3(RFT1): c.1222A > G | 91869 | RFT1 | [′TCTCCTCCCCAGGTACAATTTTGTGRTGCT |
| | (p.Met408Val) | | | GGCCCTGTCCTCCTCATTCCT′] |
| 5037 | NM_020533.2(MCOLN1): | 57192 | MCOLN1 | [′TCTGAGTGCCTGTTCTCGCTCATCARTGGG |
| | c.1406A > G (p.Asn469Ser) | | | GACGACATGTTTGTGACGTTC′] |
| 5038 | NM_004456.4(EZH2): c.458A > G | 2146 | EZH2 | [′TTCATTGAAGAACTAATAAAAAATTRTGAT |
| | (p.Tyr153Cys) | | | GGGAAAGTACACGGGGATAGA′] |
| 5039 | NM_005045.3(RELN): c.2168A > G | 5649 | RELN | [′ACCACGGATAGAGTAAAAGTTATGGYAAG |
| | (p.Tyr723Cys) | | | AGGAGAGCCTGGAACTGCCAAA′] |
| 5040 | NM_006772.2(SYNGAP1): | 8831 | SYNGAP1 | [′CCCACCCCATCCCCATTTCCCCCCCRGCAA |
| | c.388 − 2A > G | | | GGCTTCCTGAGCCGACGGCTA′] |
| 5041 | NM_001080508.2(TBX18): | 9096 | TBX18 | [′GATAGGCACTGAGATGATCATCACCRAGG |
| | c.487A > G (p.Lys163Glu) | | | CCGGCAGGTAATGGGCAAGCTG′] |
| 5042 | NM_004964.2(HDAC1): c.461A > G | 3065 | HDAC1 | [′GAGGCATCTGGCTTCTGTTACGTCARTGAT |
| | (p.Asn154Ser) | | | ATCGTCTTGGCCATCCTGGAA′] |
| 5043 | NM_014946.3(SPAST): c.1168A > G | 6683 | SPAST | [′TGGTCCACCTGGGAATGGGAAGACARTGC |
| | (p.Met390Val) | | | TGGTAAGGGTTCTCTTCAAATT′] |
| 5044 | NM_000314.6(PTEN): c.71A > G | 5728 | PTEN | [′TATCAAGAGGATGGATTCGACTTAGRCTTG |
| | (p.Asp24Gly) | | | ACCTGTATCCATTTCTGCGGC′] |
| 5045 | NM_004380.2(CREBBP): c.4409A > | 1387 | CREBBP | [′GGGTCCTGCAGGTATGTGACAGGGCRCAT |
| | G (p.His1470Arg) | | | CTGGGCCTGTCCTCCAAGTGAA′] |
| 5046 | NM_018206.4(VPS35): c.1463A > G | 55737 | VPS35 | [′GATCCAGAAGATTTTGCTGATGAGCRGAG |
| | (p.Gln488Arg) | | | CCTTGTGGGCCGCTTCATTCAT′] |
| 5047 | NM_152296.4(ATP1A3): c.971A > G | 478 | ATP1A3 | [′GGCATCATCGTGGCCAATGTCCCAGRGGG |
| | (p.Glu324Gly) | | | TCTGCTGGCCACTGTCACTGTA′] |
| 5048 | NM_172107.2(KCNQ2): c.710A > G | 3785 | KCNQ2 | [′TCTCAGGAGCTGGTCACTGCCTGGTRCATC |
| | (p.Tyr237Cys) | | | GGCTTCCTTTGTCTCATCCTG′] |
| 5049 | NM_001017980.3(VMA21): | 203547 | VMA21 | [′ACTAAATCTTACATATTTGAAGGTARTCTT |
| | c.163 + 4A > G | | | AGACCCATTAAAACAAGATGT′] |
| 5050 | NM_000489.4(ATRX): c.740A > G | 546 | ATRX | [′TTCTGCAAGAAATGCATTCTACGCARCCTT |
| | (p.Asn247Ser) | | | GGTCGAAAGGAGTTGTCCACA′] |
| 5051 | NM_021147.4(CCNO): c.716A > G | 10309 | CCNO | [′CCCACCATTAGCTTCTTCCTGGAGCRTTTC |
| | (p.His239Arg) | | | ACGCACGCTCGCGTGGAGGCG′] |
| 5052 | NM_031924.4(RSPH3): | 83861 | RSPH3 | [′CTCTAGAGAATCAGGCCGTCCGAGCYAAC |
| | c.631 − 2A > G | | | AGTGATAGAAAATACTTCTAGA′] |
| 5053 | NM_000069.2(CACNA1S): | 779 | CACNAIS | [′TCGCTTTCCCATCCTTTTCCTTCCCRGGGCT |
| | c.3526 − 2A > G | | | ACTTTGGAGACCCCTGGAAT′] |
| 5054 | NM_000533.4(PLP1): c.1A > G | 5354 | PLP1 | [′CAATTGGAGTCAGAGTCCCAAAGACRTGG |
| | (p.Met1Val) | | | GTAAGTTTCAAAAACTTTAGCA′] |
| 5055 | NM_207352.3(CYP4V2): c.1396A > | 285440 | CYP4V2 | [′CGTGCCCTTCTCTGCTGGCCCCAGGRACTG |
| | G (p.Asn466Asp) | | | TATAGGTTTGTATCCATCTGA′] |
| 5056 | NM_033409.3(SLC52A3): c.403A > | 113278 | SLC52A3 | [′ACAAAGAAGGTGGTGAGGTAGTAGGYGG |
| | G (p.Thr135Ala) | | | GCAGCCGGCTCATGAACGGCAGG′] |
| 5057 | NM_033409.3(SLC52A3): c.62A > G | 113278 | SLC52A3 | [′CAGGGGCAGCTCTACCCAGAGCCCAYTGA |
| | (p.Asn21Ser) | | | TGGTCACCCAGGAGCCCATTCC′] |
| 5058 | NM_017662.4(TRPM6): c.3173A > | 140803 | TRPM6 | [′CAAGCTGTCTACCTCTTCGTGCAATRTATC |
| | G (p.Tyr1058Cys) | | | ATCATGGTGAACCTGTTGATT′] |
| 5059 | NM_006642.3(SDCCAG8): | 10806 | SDCCAG8 | [′AATAAACCCTCTGCTTTTGCTCTATRGTTA |
| | c.221 − 2A > G | | | ATCAGCTCAAAGATTTGTTGC′] |
| 5060 | NM_022455.4(NSD1): c.5990A > G | 64324 | NSD1 | [′CAAGAACATGATATCACTAATTTCTRTATG |
| | (p.Tyr1997Cys) | | | CTCACCCTAGACAAAGTAAGT′] |
| 5061 | NM_000352.4(ABCC8): c.563A > G | 6833 | ABCC8 | [′GGGATGCTGCTCCTCGTGGAGGTCARTGTC |
| | (p.Asn188Ser) | | | ATCAGGGTGAGGGTAAGCAGG′] |
| 5062 | NM_000275.2(OCA2): c.1427A > G | 4948 | OCA2 | [′GATGGCAGTGGCAGCTCCTCCAATGYTTGT |
| | (p.Asn476Ser) | | | GAAGATCACTTCTGCAATCAG′] |
| 5063 | NM_001848.2(COL6A1): | 1291 | COL6A1 | [′ATTTTCTAGTTTTCTTCCTCTTTCCRGGGGG |
| | c.1003 − 2A > G | | | AGATGGGGTACCCAGGCCTG′] |
| 5064 | NM_003560.2(PLA2G6) | 8398 | PLA2G6 | [′CAGCATGCCCTGCTCTGTGCCTCACRGAAC |
| | c.1349 − 2A > G | | | TACAGGATCTCATGCACATCT′] |
| 5065 | NM_178151.2(DCX): c.280A > G | 1641 | DCX | [′TGACCTGACGCGATCTCTGTCTGACRACAT |
| | (p.Asn94Asp) | | | CAACCTGCCTCAGGGAGTGCG′] |
| 5066 | NM_000425.4(L1CAM): c.2351A > | 3897 | LICAM | [′TCCAACACGTCCACCTTCGTGCCCTRTGAG |
| | G (p.Tyr784Cys) | | | ATCAAAGTCCAGGCCGTCAAC′] |
| 5067 | NM_000052.6(ATP7A): | 538 | ATP7A | [′TCAATGATTATCATTCCTATATTGCRGTTTT |
| | c.2173 − 2A > G | | | TCGGAGGCTGGTACTTCTAC′] |
| 5068 | NM_020247.4(ADCK3): c.1286A > | 56997 | ADCK3 | [′CTGCTGAAGGGCCACCCCTTCTTCTRTGTG |
| | G (p.Tyr429Cys) | | | CCTGAGATTGTGGATGAGCTC′] |
| 5069 | NM_000143.3(FH): c.554A > G | 2271 | FH | [′AAACAGCAAAGCTCACATACTGACCYGGC |
| | (p.Gln185Arg) | | | TTTTATTAACATGATCGTTGGG′] |
| 5070 | NM_033109.4(PNPT1): c.1453A > G | 87178 | PNPT1 | [′AAACTTCCGCCACATGCAGATGCCAKAGA |
| | (p.Met485Val) | | | AGATGACCCTATAGAAAGAAAA′] |
| 5071 | NM_005888.3(SLC25A3): | 5250 | SLC25A3 | [′TACTTACTTGATTTTTTTTTTTCCARTCAAA |
| | c.158 − 9A > G | | | CAGAGCAGTATAGCTGTGAC′] |
| 5072 | NM_181426.1(CCDC39): | 339829 | CCDC39 | [′TTGTGCTGCTTTATCCAATTCTAACYGTCA |
| | c.610 − 2A > G | | | AACAGAGAGCAAAGAACATTT′] |
| 5073 | NM_153704.5(TMEM67): c.725A > | 91147 | TMEM67 | [′ATTGTTCTGTTGTAGGTATATGCCARTCTA |
| | G (p.Asn242Ser) | | | ACATCTTGTCAAGCTCTTGGA′] |
| 5074 | NM_000166.5(GJB1): c.305A > G | 2705 | GJB1 | [′CACGTGGCTCACCAGCAACACATAGRGAA |
| | (p.Glu102Gly) | | | GAAAATGCTACGGCTTGAGGGC′] |
| 5075 | NM_019098.4(CNGB3): c.1193A > | 54714 | CNGB3 | [′AATTAAAGTTCGAACTGCCCAATAAYAAC |
| | G (p.Tyr398Cys) | | | ATCTCAGATACCTGTGAAAACA′] |
| 5076 | NM_000070.2(CAPN3): | 825 | CAPN3 | [′CCATATGGCTCTCTCTCTTCTTCCARCCTCT |
| | c.1194 − 9A > G | | | CAGGATGTCCTATGAGGATT′] |
| 5077 | NM_002860.3(ALDH18A1): | 5832 | ALDH18A1 | [′AGGAATAGGGAGGTTCTCATGAAGABATT |
| | c.2345A > G (p.Tyr782Cys) | | | TTAAACTTCCATGCTCTGAGAA′] |
| 5078 | NM_001414.3(EIF2B1): c.824A > G | 1967 | EIF2B1 | [′CAGAGTGATTAAGGAAGGGGCAGTGYAGT |
| | (p.Tyr275Cys) | | | CGACCCACGGATGCTCCTCTTT′] |
| 5079 | NM_182896.2(ARL13B): c.461A > G | 200894 | ARL13B | [′TGTCTATCTCTGGAAAAATTGGTCARTGAG |
| | (p.Asn154Ser) | | | CACAAGTGCCTGTGTCAGATA′] |
| 5080 | NM_001134831.1(AHI1): | 54806 | AHI1 | [′TAGTAAGATGAAACAGGCCGTCCACYGTA |
| | c.1152 − 2A > G | | | CAAAAAAAGATACTTCCATTAA′] |
| 5081 | NM_153704.5(TMEM67): | 91147 | TMEM67 | [′TCAGTTTTAAAGGAGAAAACCAGGTRAAA |
| | c.978 + 3A > G | | | GTGTCTAATATCATTAGAGGAT′] |
| 5082 | NM_015681.3(B9D1): c.95A > G | 27077 | B9D1 | [′CCAGTCCTGGCCGTACACAAAGCAGYACT |
| | (p.Tyr32Cys) | | | TGCAGTAGAGGTCATCATACTC′] |
| 5083 | NM_014049.4(ACAD9): c.1A > G | 28976 | ACAD9 | [′CTGAGGCTGGGGAACATCGGGCAGCWTGA |
| | (p.Met1Val) | | | GCGGCTGCGGGCTCTTCCTGCG′] |

TABLE 8
xCas9v3 Mutations (K294R/Q1256K Series)

| xCas9 3.0 | xCas9 3.1 | xCas9 3.2 | xCas9 3.3 | xCas9 3.4 |
|---|---|---|---|---|
| | | N175T | | |
| P230F | | | | |
| | | | D257N | |
| S267G | | S267G | S267G | |
| K294R | K294R | K294R | K294R | K294R |
| | | | T466A | |
| E480K | E480K | E480K | E480K | E480K |
| E543D | E543D | E543D | E543D | E543D |
| | A711E | | | |
| | E1207G | | I1063V | |
| E1219V | E1219V | E1219V | E1219V | E1219V |
| Q1256K | Q1256K | Q1256K | Q1256K | Q1256K |

TABLE 9
xCas9v3 Mutations (A262T/S409I Series)

| xCas9 3.5 | xCas9 3.6 | xCas9 3.7 | xCas9 3.8 | xCas9 3.9 | xCas9 3.10 | xCas9 3.11 | xCas9 3.12 |
|---|---|---|---|---|---|---|---|
| E108G | E108G | | | | | E108G | E108G |
| | S217A | | | | | | |
| A262T | A262T | A262T | A262T | A262T | A262T | A262T | A262T |
| | | R324L | | | | | |
| S409I | S409I | S409I | S409I | S409I | S409I | S409I | S409I |
| E480K | E480K | E480K | E480K | E480K | E480K | E480K | E480K |
| E543D | E543D | E543D | E543D | E543D | E543D | E543D | E543D |
| | | | D605D | D605D | | | |
| K673E | | | | | | K673E | |
| M694I | M694I | M694I | M694I | M694I | M694I | M694I | M694I |
| E1219V | E1219V | E1219V | E1219V | E1219V | E1219V | E1219V | E1219V |
| | | | H1264Y | | | | |
| L1365I | L1365I | | | | L1365I | | L1365I |

TABLE 10
PAM Depletion Scores (xCas9v3.0-3.6 Mutations)

| | 22-4 | 22-10 | 22-11 | 22-14 | 22-21 | 22-65 | 22-66 |
|---|---|---|---|---|---|---|---|
| | xCas9 | xCas9 | xCas9 | xCas9 | xCas9 | xCas9 | xCas9 |
| | 3.0 | 3.1 | 3.2 | 3.3 | 3.4 | 3.5 | 3.6 |
| AAA | 0.61 | 0.69 | 1.38 | 0.90 | 0.98 | 1.29 | 1.47 |
| AAC | 0.67 | 0.77 | 0.78 | 0.71 | 0.93 | 0.80 | 1.55 |
| AAG | 13.88 | 15.70 | 32.70 | 28.75 | 22.79 | 48.60 | 92.02 |
| AAT | 0.52 | 0.59 | 0.87 | 0.63 | 0.76 | 0.87 | 0.84 |
| ACA | 0.52 | 0.52 | 0.48 | 0.51 | 0.57 | 0.59 | 0.72 |
| ACC | 0.54 | 0.50 | 0.48 | 0.48 | 0.47 | 0.46 | 0.55 |
| ACG | 10.15 | 30.07 | 41.38 | 108.50 | 32.19 | 25.52 | 158.44 |
| ACT | 0.46 | 0.47 | 0.39 | 0.41 | 0.44 | 0.40 | 0.50 |
| AGA | 13.22 | 28.30 | 34.42 | 57.31 | 38.26 | 31.93 | 170.85 |
| AGC | 7.55 | 5.84 | 11.17 | 8.69 | 7.63 | 13.13 | 5.54 |
| AGG | 12.23 | 188.82 | 37.97 | 182.49 | 194.93 | 82.99 | 355.32 |
| AGT | 13.19 | 9.75 | 17.03 | 16.09 | 10.90 | 19.84 | 22.47 |
| ATA | 0.58 | 0.56 | 0.51 | 0.52 | 0.51 | 0.53 | 0.49 |
| ATC | 0.52 | 0.50 | 0.45 | 0.45 | 0.47 | 0.42 | 0.38 |
| ATG | 11.38 | 14.85 | 23.55 | 40.11 | 20.48 | 30.27 | 108.77 |
| ATT | 0.48 | 0.46 | 0.43 | 0.42 | 0.43 | 0.41 | 0.39 |
| CAA | 1.55 | 2.00 | 6.63 | 5.06 | 3.42 | 6.29 | 4.66 |
| CAC | 0.57 | 0.65 | 0.99 | 0.75 | 0.86 | 0.93 | 3.20 |
| CAG | 15.05 | 11.83 | 26.90 | 26.86 | 22.15 | 32.07 | 137.31 |
| CAT | 4.41 | 6.06 | 17.67 | 7.55 | 6.30 | 8.13 | 7.87 |
| CCA | 0.48 | 0.46 | 0.41 | 0.43 | 0.42 | 0.40 | 0.39 |
| CCC | 0.53 | 0.51 | 0.46 | 0.45 | 0.45 | 0.43 | 0.44 |
| CCG | 3.35 | 2.67 | 6.87 | 6.98 | 4.69 | 8.56 | 5.44 |
| CCT | 0.53 | 0.50 | 0.45 | 0.49 | 0.46 | 0.43 | 0.38 |
| CGA | 9.23 | 49.45 | 43.50 | 106.20 | 62.04 | 27.17 | 116.32 |
| CGC | 13.79 | 8.59 | 17.62 | 15.06 | 12.16 | 21.40 | 11.61 |
| CGG | 16.85 | 223.84 | 46.41 | 346.14 | 96.28 | 90.82 | 252.73 |
| CGT | 12.66 | 23.87 | 36.06 | 42.02 | 20.18 | 27.33 | 179.69 |
| CTA | 0.54 | 0.50 | 0.45 | 0.47 | 0.47 | 0.45 | 0.49 |
| CTC | 0.51 | 0.48 | 0.43 | 0.44 | 0.45 | 0.42 | 0.38 |
| CTG | 5.39 | 3.40 | 6.92 | 8.28 | 5.95 | 11.34 | 4.20 |
| CTT | 0.52 | 0.52 | 0.46 | 0.46 | 0.44 | 0.44 | 0.82 |
| GAA | 10.98 | 7.67 | 14.45 | 11.25 | 9.75 | 11.86 | 6.86 |
| GAC | 0.88 | 1.35 | 4.85 | 2.92 | 2.40 | 5.25 | 4.15 |
| GAG | 11.85 | 55.33 | 39.91 | 118.83 | 109.84 | 85.83 | 390.44 |
| GAT | 7.69 | 5.68 | 10.55 | 9.22 | 6.41 | 11.03 | 9.53 |
| GCA | 0.49 | 0.49 | 0.47 | 0.52 | 0.53 | 0.59 | 0.61 |
| GCC | 0.53 | 0.52 | 0.50 | 0.50 | 0.49 | 0.46 | 0.52 |
| GCG | 13.68 | 13.44 | 22.56 | 46.72 | 32.75 | 35.86 | 97.69 |
| GCT | 0.51 | 0.50 | 0.45 | 0.48 | 0.46 | 0.45 | 0.61 |
| GGA | 9.74 | 82.32 | 39.45 | 172.39 | 102.30 | 85.53 | 77.46 |
| GGC | 12.21 | 10.04 | 17.84 | 15.18 | 14.04 | 27.07 | 17.46 |
| GGG | 18.90 | 381.76 | 70.36 | 281.12 | 164.21 | 111.87 | 718.40 |
| GGT | 10.87 | 22.11 | 32.25 | 88.31 | 40.66 | 40.16 | 257.92 |
| GTA | 0.56 | 0.59 | 0.77 | 0.72 | 0.76 | 1.03 | 1.55 |
| GTC | 0.52 | 0.51 | 0.46 | 0.52 | 0.49 | 0.45 | 0.58 |
| GTG | 11.43 | 16.42 | 28.54 | 72.25 | 33.31 | 47.65 | 382.48 |
| GTT | 0.48 | 0.45 | 0.41 | 0.43 | 0.43 | 0.42 | 0.76 |
| TAA | 0.58 | 0.67 | 1.59 | 0.99 | 1.04 | 1.69 | 1.53 |
| TAC | 0.56 | 0.54 | 0.51 | 0.51 | 0.52 | 0.50 | 0.44 |
| TAG | 11.34 | 10.19 | 15.99 | 22.04 | 15.24 | 27.89 | 35.59 |
| TAT | 0.56 | 0.64 | 1.26 | 0.85 | 0.89 | 1.21 | 2.60 |
| TCA | 0.50 | 0.48 | 0.43 | 0.45 | 0.46 | 0.45 | 0.44 |
| TCC | 0.50 | 0.48 | 0.43 | 0.46 | 0.44 | 0.42 | 0.47 |
| TCG | 10.38 | 8.24 | 14.95 | 15.64 | 9.96 | 15.57 | 34.80 |
| TCT | 0.52 | 0.50 | 0.45 | 0.44 | 0.46 | 0.41 | 0.46 |
| TGA | 9.68 | 61.64 | 44.45 | 188.12 | 99.42 | 46.89 | 186.41 |
| TGC | 13.64 | 9.07 | 15.11 | 11.69 | 11.22 | 15.01 | 8.15 |
| TGG | 12.90 | 223.88 | 63.67 | 259.65 | 115.56 | 80.51 | 210.65 |
| TGT | 11.53 | 18.90 | 31.99 | 36.30 | 18.72 | 21.90 | 122.87 |
| TTA | 0.61 | 0.57 | 0.52 | 0.54 | 0.51 | 0.52 | 0.30 |
| TTC | 0.53 | 0.50 | 0.44 | 0.45 | 0.44 | 0.43 | 0.27 |
| TTG | 13.57 | 6.61 | 10.15 | 13.27 | 7.38 | 14.26 | 12.24 |
| TTT | 0.53 | 0.49 | 0.44 | 0.45 | 0.48 | 0.44 | 0.28 |

PAM Depletion Scores (xCas9v3.7-3.12 Mutations)

| | 22-68 | 22-75 | 22-78 | 22-82 | 22-87 | 22-90 |
|---|---|---|---|---|---|---|
| | xCas9 | xCas9 | xCas9 | xCas9 | xCas9 | xCas9 |
| | 3.7 | 3.8 | 3.9 | 3.10 | 3.11 | 3.12 |
| AAA | 0.92 | 1.00 | 4.30 | 0.63 | 0.48 | 1.67 |
| AAC | 8.72 | 3.59 | 1.55 | 1.59 | 0.94 | 1.34 |
| AAG | 23.44 | 20.16 | 16.46 | 10.63 | 26.46 | 22.44 |
| AAT | 1.03 | 0.89 | 1.22 | 1.07 | 0.76 | 0.96 |
| ACA | 0.80 | 0.92 | 0.52 | 0.68 | 1.09 | 0.83 |
| ACC | 0.42 | 1.37 | 0.32 | 1.03 | 0.81 | 0.53 |
| ACG | 11.20 | 6.65 | 21.80 | 1.38 | 1.23 | 0.88 |
| ACT | 0.27 | 0.38 | 0.24 | 0.88 | 0.54 | 0.66 |
| AGA | 11.63 | 11.95 | 14.60 | 0.89 | 1.42 | 1.78 |
| AGC | 1.03 | 11.25 | 8.05 | 1.54 | 1.77 | 2.39 |
| AGG | 8.05 | 11.61 | 21.28 | 1.37 | 33.28 | 113.98 |
| AGT | 11.10 | 6.85 | 12.73 | 0.39 | 2.70 | 0.91 |
| ATA | 0.73 | 0.79 | 0.58 | 1.04 | 0.70 | 0.94 |
| ATC | 0.43 | 0.47 | 0.28 | 0.63 | 0.86 | 0.87 |
| ATG | 15.46 | 13.03 | 4.76 | 2.21 | 2.39 | 1.73 |
| ATT | 0.62 | 0.30 | 0.53 | 0.59 | 0.91 | 0.74 |
| CAA | 8.96 | 6.08 | 1.97 | 1.46 | 0.53 | 0.67 |
| CAC | 1.65 | 1.31 | 0.81 | 0.60 | 0.75 | 0.73 |
| CAG | 3.46 | 1.99 | 1.44 | 23.50 | 9.51 | 13.76 |
| CAT | 20.52 | 44.57 | 18.70 | 16.29 | 15.96 | 0.36 |
| CCA | 0.40 | 0.31 | 0.64 | 0.87 | 0.55 | 0.64 |
| CCC | 0.35 | 0.54 | 0.55 | 1.12 | 0.56 | 0.69 |
| CCG | 4.35 | 5.28 | 5.57 | 1.37 | 0.94 | 0.8 |
| CCT | 0.40 | 1.04 | 0.36 | 1.22 | 0.67 | 0.59 |
| CGA | 4.47 | 7.60 | 5.26 | 1.35 | 1.36 | 2.02 |
| CGC | 13.35 | 10.98 | 5.45 | 4.03 | 5.37 | 3.66 |
| CGG | 6.06 | 5.52 | 25.23 | 31.85 | 19.44 | 34.65 |
| CGT | 17.13 | 7.41 | 17.31 | 0.63 | 1.44 | 0.66 |
| CTA | 0.76 | 0.50 | 0.50 | 1.97 | 1.45 | 1.05 |
| CTC | 0.40 | 0.26 | 0.65 | 0.58 | 0.45 | 0.81 |
| CTG | 5.64 | 9.49 | 6.82 | 1.35 | 1.41 | 2.11 |
| CTT | 0.50 | 0.63 | 0.68 | 0.54 | 0.73 | 0.88 |
| GAA | 9.81 | 6.07 | 4.68 | 2.07 | 0.87 | 1.09 |
| GAC | 3.91 | 3.95 | 2.82 | 0.44 | 0.86 | 0.56 |
| GAG | 23.26 | 21.32 | 9.88 | 16.93 | 18.42 | 40.73 |
| GAT | 5.06 | 9.85 | 1.07 | 0.75 | 1.06 | 0.63 |
| GCA | 0.56 | 0.81 | 0.79 | 1.46 | 0.44 | 0.89 |
| GCC | 0.35 | 0.52 | 0.71 | 0.65 | 3.67 | 0.73 |
| GCG | 16.11 | 12.53 | 9.43 | 1.59 | 1.98 | 2.22 |
| GCT | 0.42 | 0.88 | 0.27 | 0.66 | 1.14 | 0.76 |
| GGA | 3.01 | 18.40 | 33.07 | 27.28 | 16.20 | 46.82 |
| GGC | 6.03 | 3.83 | 11.69 | 8.03 | 22.56 | 3.92 |
| GGG | 12.16 | 10.26 | 15.08 | 17.30 | 25.85 | 128.03 |
| GGT | 11.25 | 13.77 | 2.94 | 12.71 | 16.11 | 16.22 |
| GTA | 1.38 | 1.08 | 1.24 | 0.75 | 3.52 | 1.09 |
| GTC | 0.96 | 0.31 | 0.50 | 0.93 | 0.72 | 0.81 |
| GTG | 6.68 | 17.93 | 26.86 | 9.93 | 9.61 | 2.72 |
| GTT | 0.45 | 0.33 | 0.99 | 0.65 | 1.61 | 1.01 |
| TAA | 3.04 | 2.16 | 1.84 | 1.21 | 1.08 | 0.68 |
| TAC | 0.61 | 0.52 | 0.68 | 0.95 | 0.68 | 0.86 |
| TAG | 4.76 | 15.71 | 1.10 | 8.15 | 8.25 | 8.87 |
| TAT | 1.62 | 2.10 | 1.01 | 0.73 | 0.74 | 0.66 |
| TCA | 0.41 | 0.66 | 0.58 | 0.46 | 0.77 | 0.68 |
| TCC | 0.54 | 0.29 | 0.38 | 1.36 | 0.86 | 0.82 |
| TCG | 1.41 | 4.20 | 9.11 | 0.84 | 0.46 | 0.69 |
| TCT | 0.47 | 0.44 | 0.38 | 0.60 | 1.00 | 0.94 |
| TGA | 22.42 | 5.39 | 15.72 | 1.78 | 3.13 | 3.69 |
| TGC | 6.78 | 6.81 | 11.35 | 2.4 | 6.55 | 4.08 |
| TGG | 20.36 | 11.36 | 11.56 | 9.97 | 21.64 | 19.87 |
| TGT | 10.32 | 8.82 | 21.17 | 0.94 | 0.79 | 0.73 |
| TTA | 0.65 | 0.29 | 0.77 | 0.94 | 1.35 | 0.75 |
| TTC | 0.62 | 1.07 | 0.55 | 0.86 | 1.07 | 0.58 |
| TTG | 8.41 | 6.07 | 9.07 | 0.67 | 0.56 | 0.72 |
| TTT | 0.43 | 0.56 | 0.44 | 0.68 | 0.60 | 0.75 |

### REFERENCES

[0326] 1. Humbert O, Davis L, Maizels N. Targeted gene therapies: tools, applications, optimization. Crit Rev Biochem Mol. 2012; 47 (3): 264-81. PMID: 22530743.
[0327] 2. Perez-Pinera P, Ousterout D G, Gersbach C A. Advances in targeted genome editing. Curr Opin Chem Biol. 2012; 16 (3-4): 268-77. PMID: 22819644.
[0328] 3. Urnov F D, Rebar E J, Holmes M C, Zhang H S, Gregory P D. Genome editing with engineered zinc finger nucleases. Nat Rev Genet. 2010; 11 (9): 636-46. PMID: 20717154.
[0329] 4. Joung J K, Sander J D. TALENs: a widely applicable technology for targeted genome editing. Nat Rev Mol Cell Biol. 2013; 14 (1): 49-55. PMID: 23169466.
[0330] 5. Charpentier E, Doudna J A. Biotechnology: Rewriting a genome. Nature. 2013; 495, (7439): 50-1. PMID: 23467164.
[0331] 6. Pan Y, Xia L, Li A S, Zhang X, Sirois P, Zhang J, Li K. Biological and biomedical applications of engineered nucleases. Mol Biotechnol. 2013; 55 (1): 54-62. PMID: 23089945.
[0332] 7. De Souza, N. Primer: genome editing with engineered nucleases. Nat Methods. 2012; 9 (1): 27. PMID: 22312638.
[0333] 8. Santiago Y, Chan E, Liu P Q, Orlando S, Zhang L, Urnov F D, Holmes M C, Guschin D, Waite A, Miller J C, Rebar E J, Gregory P D, Klug A, Collingwood T N. Targeted gene knockout in mammalian cells by using engineered zinc-finger nucleases. Proc Natl Acad Sci USA. 2008; 105 (15): 5809-14. PMID: 18359850.
[0334] 9. Cargill M, Altshuler D, Ireland J, Sklar P, Ardlie K, Patil N, Lane C R, Lim E P, Kalyanaraman N, Nemesh J, Ziaugra L, Friedland L, Rolfe A, Warrington J, Lipshutz R, Daley G Q, Lander E S. Characterization of single-nucleotide polymorphisms in coding regions of human genes. Nat Genet. 1999; 22 (3): 231-8. PMID: 10391209.
[0335] 10. Jansen R, van Embden J D, Gaastra W, Schouls L M. Identification of genes that are associated with DNA repeats in prokaryotes. Mol Microbiol. 2002; 43 (6): 1565-75. PMID: 11952905.
[0336] 11. Mali P, Esvelt K M, Church G M. Cas9 as a versatile tool for engineering biology. Nat Methods. 2013; 10 (10): 957-63. PMID: 24076990.
[0337] 12. Jore M M, Lundgren M, van Duijin E, Bultema J B, Westra E R, Waghmare S P, Wiedenheft B, Pul U, Wurm R, Wagner R, Beijer M R, Barendregt A, Shou K, Snijders A P, Dickman M J, Doudna J A, Bockema E J, Heck A J, van der Oost J, Brouns S J. Structural basis for CRISPR RNA-guided DNA recognition by Cascade. Nat Struct Mol Biol. 2011; 18 (5): 529-36. PMID: 21460843.
[0338] 13. Horvath P, Barrangou R. CRISPR/Cas, the immune system of bacteria and archaea. Science. 2010; 327 (5962): 167-70. PMID: 20056882.
[0339] 14. Wiedenheft B, Sternberg S H, Doudna J A. RNA-guided genetic silencing systems in bacteria and archaea. Nature. 2012; 482 (7385): 331-8. PMID: 22337052.
[0340] 15. Gasiunas G, Siksnys V. RNA-dependent DNA endonuclease Cas9 of the CRISPR system: Holy Grail of genome editing? Trends Microbiol. 2013; 21 (11): 562-7. PMID: 24095303.
[0341] 16. Qi L S, Larson M H, Gilbert L A, Doudna J A, Weissman J S, Arkin A P, Lim W A. Repurposing CRISPR as an RNA-guided platform for sequence-specific control of gene expression. Cell. 2013; 152 (5): 1173-83. PMID: 23452860.
[0342] 17. Perez-Pinera P, Kocak D D, Vockley C M, Adler A F, Kabadi A M, Polstein L R, Thakore P I, Glass K A, Ousterout D G, Leong K W, Guilak F, Crawford G E, Reddy T E, Gersbach C A. RNA-guided gene activation by CRISPR-Cas9-based transcription factors. Nat Methods. 2013; 10 (10): 973-6. PMID: 23892895.
[0343] 18. Mali P, Aach J, Stranges P B, Esvelt K M, Moosburner M, Kosuri S, Yang L, Church G M. CAS9 transcriptional activators for target specificity screening and paired nickases for cooperative genome engineering. Nat Biotechnol. 2013; 31 (9): 833-8. PMID: 23907171.
[0344] 19. Gilbert L A, Larson M H, Morsut L, Liu Z, Brar G A, Torres S E, Stern-Ginossar N, Brandman O, Whitehead E H, Doudna J A, Lim W A, Weissman J S, Qi L S. CRISPR-mediated modular RNA-guided regulation of transcription in eukaryotes. Cell. 2013; 154 (2): 442-51. PMID: 23849981.
[0345] 20. Larson M H, Gilbert L A, Wang X, Lim W A, Weissman J S, Qi L S. CRISPR interference (CRISPRi) for sequence-specific control of gene expression. Nat Protoc. 2013; 8 (11): 2180-96. PMID: 24136345.
[0346] 21. Mali P, Yang L, Esvelt K M, Aach J, Guell M, DiCarlo J E, Norville J E, Church G M. RNA-guided human genome engineering via Cas9. Science. 2013; 339 (6121): 823-6. PMID: 23287722.
[0347] 22. Cole-Strauss A, Yoon K, Xiang Y, Byrne B C, Rice M C, Gryn J, Holloman W K, Kmicc E B. Correction of the mutation responsible for sickle cell anemia by an RNA-DNA oligonucleotide. Science. 1996; 273 (5280): 1386-9. PMID: 8703073.
[0348] 23. Tagalakis A D, Owen J S, Simons J P. Lack of RNA-DNA oligonucleotide (chimeraplast) mutagenic activity in mouse embryos. Mol Reprod Dev. 2005; 71 (2): 140-4. PMID: 15791601.
[0349] 24. Ray A, Langer M. Homologous recombination: ends as the means. Trends Plant Sci. 2002; 7 (10): 435-40. PMID 12399177.
[0350] 25. Britt A B, May G D. Re-engineering plant gene targeting. Trends Plant Sci. 2003; 8 (2): 90-5. PMID: 12597876.
[0351] 26. Vagner V, Ehrlich S D. Efficiency of homologous DNA recombination varies along the Bacillus subtilis chromosome. J Bacteriol. 1988; 170 (9): 3978-82. PMID: 3137211.
[0352] 27. Salch-Gohari N, Helleday T. Conservative homologous recombination preferentially repairs DNA double-strand breaks in the S phase of the cell cycle in human cells. Nucleic Acids Res. 2004; 32 (12): 3683-8. PMID: 15252152.
[0353] 28. Lombardo A, Genovese P, Beausejour C M, Colleoni S, Lec Y L, Kim K A, Ando D, Urnov F D, Galli C, Gregory P D, Holmes M C, Naldini L. Gene editing in human stem cells using zinc finger nucleases and integrase-defective lentiviral vector delivery. Nat Biotechnol. 2007; 25 (11): 1298-306. PMID: 17965707.
[0354] 29. Conticello S G. The AID/APOBEC family of nucleic acid mutators. Genome Biol. 2008; 9 (6): 229. PMID: 18598372.
[0355] 30. Reynaud C A, Aoufouchi S, Faili A, Weill J C. What role for AID: mutator, or assembler of the immunoglobulin mutasome? Nat Immunol. 2003; 4 (7): 631-8.
[0356] 31. Bhagwat A S. DNA-cytosine deaminases: from antibody maturation to antiviral defense. DNA Repair (Amst). 2004; 3 (1): 85-9. PMID: 14697763.
[0357] 32. Navaratnam N, Sarwar R. An overview of cytidine deaminases. Int J Hematol. 2006; 83 (3): 195-200. PMID: 16720547.
[0358] 33. Holden L G, Prochnow C, Chang Y P, Bransteitter R, Chelico L, Sen U, Stevens R C, Goodman M F, Chen X S. Crystal structure of the anti-viral APOBEC3G catalytic domain and functional implications. Nature. 2008; 456 (7218): 121-4. PMID: 18849968.
[0359] 34. Chelico L, Pham P, Petruska J, Goodman M F. Biochemical basis of immunological and retroviral responses to DNA-targeted cytosine deamination by activation-induced cytidine deaminase and APOBEC3G. J Biol Chem. 2009; 284 (41). 27761-5. PMID: 19684020.
[0360] 35. Pham P, Bransteitter R, Goodman M F. Reward versus risk: DNA cytidine deaminases triggering immunity and disease. Biochemistry. 2005; 44 (8): 2703-15. PMID 15723516.
[0361] 36. Chen X, Zaro J L, Shen W C. Fusion protein linkers: property, design and functionality. Adv Drug Deliv Rev. 2013; 65 (10): 1357-69. PMID: 23026637.
[0362] 37. Slaymaker, I. M. et al. Rationally engineered Cas9 nucleases with improved specificity. Science, doi: 10.1126/science.aad5227 (2015).
[0363] 38. Kleinstiver, B. P. et al. Engineered CRISPR-Cas9 nucleases with altered PAM specificities. Nature 523, 481-485, doi: 10.1038/nature14592 (2015).
[0364] 39. Pattanayak, V. et al. High-throughput profiling of off-target DNA cleavage reveals RNA-programmed Cas9 nuclease specificity. Nature Biotechnology 31, 839-843, doi: 10.1038/nbt.2673 (2013).
[0365] 40. Shcherbakova, D. M. & Verkhusha, V. V. Near-infrared fluorescent proteins for multicolor in vivo imaging. Nature Methods 10, 751-754, doi: 10.1038/nmeth.2521 (2013).
[0366] 41. Kleinstiver, et al., High-fidelity CRISPR-Cas9 nucleases with no detectable genome-wide off-target effects. Nature 529, 490-495 doi: 10.1038/nature16526 (2016).

[0367] All publications, patents, patent applications, publication, and database entries (e.g., sequence database entries) mentioned herein, e.g., in the Background, Summary, Detailed Description, Examples, and/or References sections, are hereby incorporated by reference in their entirety as if each individual publication, patent, patent application, publication, and database entry was specifically and individually incorporated herein by reference. In case of conflict, the present application, including any definitions herein, will control.

### EQUIVALENTS AND SCOPE

[0368] Those skilled in the art will recognize, or be able to ascertain using no more than routine experimentation, many equivalents of the embodiments described herein. The scope of the present disclosure is not intended to be limited to the above description, but rather is as set forth in the appended claims.

[0369] Articles such as “a,” “an,” and “the” may mean one or more than one unless indicated to the contrary or otherwise evident from the context. Claims or descriptions that include “or” between two or more members of a group are considered satisfied if one, more than one, or all of the group members are present, unless indicated to the contrary or otherwise evident from the context. The disclosure of a group that includes “or” between two or more group members provides embodiments in which exactly one member of the group is present, embodiments in which more than one members of the group are present, and embodiments in which all of the group members are present. For purposes of brevity those embodiments have not been individually spelled out herein, but it will be understood that each of these embodiments is provided herein and may be specifically claimed or disclaimed.

[0370] It is to be understood that the invention encompasses all variations, combinations, and permutations in which one or more limitation, element, clause, or descriptive term, from one or more of the claims or from one or more relevant portion of the description, is introduced into another claim. For example, a claim that is dependent on another claim can be modified to include one or more of the limitations found in any other claim that is dependent on the same base claim. Furthermore, where the claims recite a composition, it is to be understood that methods of making or using the composition according to any of the methods of making or using disclosed herein or according to methods known in the art, if any, are included, unless otherwise indicated or unless it would be evident to one of ordinary skill in the art that a contradiction or inconsistency would arise.

[0371] Where elements are presented as lists, e.g., in Markush group format, it is to be understood that every possible subgroup of the elements is also disclosed, and that any element or subgroup of elements can be removed from the group. It is also noted that the term “comprising” is intended to be open and permits the inclusion of additional elements or steps. It should be understood that, in general, where an embodiment, product, or method is referred to as comprising particular elements, features, or steps, embodiments, products, or methods that consist, or consist essentially of, such elements, features, or steps, are provided as well. For purposes of brevity those embodiments have not been individually spelled out herein, but it will be understood that each of these embodiments is provided herein and may be specifically claimed or disclaimed.

[0372] Where ranges are given, endpoints are included. Furthermore, it is to be understood that unless otherwise indicated or otherwise evident from the context and/or the understanding of one of ordinary skill in the art, values that are expressed as ranges can assume any specific value within the stated ranges in some embodiments, to the tenth of the unit of the lower limit of the range, unless the context clearly dictates otherwise. For purposes of brevity, the values in each range have not been individually spelled out herein, but it will be understood that each of these values is provided herein and may be specifically claimed or disclaimed. It is also to be understood that unless otherwise indicated or otherwise evident from the context and/or the understanding of one of ordinary skill in the art, values expressed as ranges can assume any subrange within the given range, wherein the endpoints of the subrange are expressed to the same degree of accuracy as the tenth of the unit of the lower limit of the range.

[0373] In addition, it is to be understood that any particular embodiment of the present invention may be explicitly excluded from any one or more of the claims. Where ranges are given, any value within the range may explicitly be excluded from any one or more of the claims. Any embodiment, element, feature, application, or aspect of the compositions and/or methods of the invention, can be excluded from any one or more claims. For purposes of brevity, all of the embodiments in which one or more elements, features, purposes, or aspects is excluded are not set forth explicitly herein.

The application's sequence listing, which the Patent Office published only in electronic form, follows.

SEQUENCE LISTING (5089 sequences)

SEQ ID NO: 1 - DNA, 4104 bp, Streptococcus pyogenes
  source 1..4104: mol_type = genomic DNA
atggataagaaatactcaataggcttagatatcggcacaaatagcgtcggatgggcggtgatcactgatgattataaggttccgtctaaaaagttcaaggttctgggaaatacagaccgccacagtatcaaaaaaaatcttataggggctcttttatttggcagtggagagacagcggaagcgactcgtctcaaacggacagctcgtagaaggtatacacgtcggaagaatcgtatttgttatctacaggagattttttcaaatgagatggcgaaagtagatgatagtttctttcatcgacttgaagagtcttttttggtggaagaagacaagaagcatgaacgtcatcctatttttggaaatatagtagatgaagttgcttatcatgagaaatatccaactatctatcatctgcgaaaaaaattggcagattctactgataaagcggatttgcgcttaatctatttggccttagcgcatatgattaagtttcgtggtcattttttgattgagggagatttaaatcctgataatagtgatgtggacaaactatttatccagttggtacaaatctacaatcaattatttgaagaaaaccctattaacgcaagtagagtagatgctaaagcgattctttctgcacgattgagtaaatcaagacgattagaaaatctcattgctcagctccccggtgagaagagaaatggcttgtttgggaatctcattgctttgtcattgggattgacccctaattttaaatcaaattttgatttggcagaagatgctaaattacagctttcaaaagatacttacgatgatgatttagataatttattggcgcaaattggagatcaatatgctgatttgtttttggcagctaagaatttatcagatgctattttactttcagatatcctaagagtaaatagtgaaataactaaggctcccctatcagcttcaatgattaagcgctacgatgaacatcatcaagacttgactcttttaaaagctttagttcgacaacaacttccagaaaagtataaagaaatcttttttgatcaatcaaaaaacggatatgcaggttatattgatgggggagctagccaagaagaattttataaatttatcaaaccaattttagaaaaaatggatggtactgaggaattattggtgaaactaaatcgtgaagatttgctgcgcaagcaacggacctttgacaacggctctattccccatcaaattcacttgggtgagctgcatgctattttgagaagacaagaagacttttatccatttttaaaagacaatcgtgagaagattgaaaaaatcttgacttttcgaattccttattatgttggtccattggcgcgtggcaatagtcgttttgcatggatgactcggaagtctgaagaaacaattaccccatggaattttgaagaagttgtcgataaaggtgcttcagctcaatcatttattgaacgcatgacaaactttgataaaaatcttccaaatgaaaaagtactaccaaaacatagtttgctttatgagtattttacggtttataacgaattgacaaaggtcaaatatgttactgagggaatgcgaaaaccagcatttctttcaggtgaacagaagaaagccattgttgatttactcttcaaaacaaatcgaaaagtaaccgttaagcaattaaaagaagattatttcaaaaaaatagaatgttttgatagtgttgaaatttcaggagttgaagatagatttaatgcttcattaggcgcctaccatgatttgctaaaaattattaaagataaagattttttggataatgaagaaaatgaagatatcttagaggatattgttttaacattgaccttatttgaagatagggggatgattgaggaaagacttaaaacatatgctcacctctttgatgataaggtgatgaaacagcttaaacgtcgccgttatactggttggggacgtttgtctcgaaaattgattaatggtattagggataagcaatctggcaaaacaatattagattttttgaaatcagatggttttgccaatcgcaattttatgcagctgatccatgatgatagtttgacatttaaagaagatattcaaaaagcacaggtgtctggacaaggccatagtttacatgaacagattgctaacttagctggcagtcctgctattaaaaaaggtattttacagactgtaaaaattgttgatgaactggtcaaagtaatggggcataagccagaaaatatcgttattgaaatggcacgtgaaaatcagacaactcaaaagggccagaaaaattcgcgagagcgtatgaaacgaatcgaagaaggtatcaaagaattaggaagtcagattcttaaagagcatcctgttgaaaatactcaattgcaaaatgaaaagctctatctctattatctacaaaatggaagagacatgtatgtggaccaagaattagatattaatcgtttaagtgattatgatgtcgatcacattgttccacaaagtttcattaaagacgattcaatagacaataaggtactaacgcgttctgataaaaatcgtggtaaatcggataacgttccaagtgaagaagtagtcaaaaagatgaaaaactattggagacaacttctaaacgccaagttaatcactcaacgtaagtttgataatttaacgaaagctgaacgtggaggtttgagtgaacttgataaagctggttttatcaaacgccaattggttgaaactcgccaaatcactaagcatgtggcacaaattttggatagtcgcatgaatactaaatacgatgaaaatgataaacttattcgagaggttaaagtgattaccttaaaatctaaattagtttctgacttccgaaaagatttccaattctataaagtacgtgagattaacaattaccatcatgcccatgatgcgtatctaaatgccgtcgttggaactgctttgattaagaaatatccaaaacttgaatcggagtttgtctatggtgattataaagtttatgatgttcgtaaaatgattgctaagtctgagcaagaaataggcaaagcaaccgcaaaatatttcttttactctaatatcatgaacttcttcaaaacagaaattacacttgcaaatggagagattcgcaaacgccctctaatcgaaactaatggggaaactggagaaattgtctgggataaagggcgagattttgccacagtgcgcaaagtattgtccatgccccaagtcaatattgtcaagaaaacagaagtacagacaggcggattctccaaggagtcaattttaccaaaaagaaattcggacaagcttattgctcgtaaaaaagactgggatccaaaaaaatatggtggttttgatagtccaacggtagcttattcagtcctagtggttgctaaggtggaaaaagggaaatcgaagaagttaaaatccgttaaagagttactagggatcacaattatggaaagaagttcctttgaaaaaaatccgattgactttttagaagctaaaggatataaggaagttaaaaaagacttaatcattaaactacctaaatatagtctttttgagttagaaaacggtcgtaaacggatgctggctagtgccggagaattacaaaaaggaaatgagctggctctgccaagcaaatatgtgaattttttatatttagctagtcattatgaaaagttgaagggtagtccagaagataacgaacaaaaacaattgtttgtggagcagcataagcattatttagatgagattattgagcaaatcagtgaattttctaagcgtgttattttagcagatgccaatttagataaagttcttagtgcatataacaaacatagagacaaaccaatacgtgaacaagcagaaaatattattcatttatttacgttgacgaatcttggagctcccgctgcttttaaatattttgatacaacaattgatcgtaaacgatatacgtctacaaaagaagttttagatgccactcttatccatcaatccatcactggtctttatgaaacacgcattgatttgagtcagctaggaggtgactga

SEQ ID NO: 2 - protein, 1367 aa, Streptococcus pyogenes
MDKKYSIGLDIGTNSVGWAVITDDYKVPSKKFKVLGNTDRHSIKKNLIGALLFGSGETAEATRLKRTARRRYTRRKNRICYLQEIFSNEMAKVDDSFFHRLEESFLVEEDKKHERHPIFGNIVDEVAYHEKYPTIYHLRKKLADSTDKADLRLIYLALAHMIKFRGHFLIEGDLNPDNSDVDKLFIQLVQIYNQLFEENPINASRVDAKAILSARLSKSRRLENLIAQLPGEKRNGLFGNLIALSLGLTPNFKSNFDLAEDAKLQLSKDTYDDDLDNLLAQIGDQYADLFLAAKNLSDAILLSDILRVNSEITKAPLSASMIKRYDEHHQDLTLLKALVRQQLPEKYKEIFFDQSKNGYAGYIDGGASQEEFYKFIKPILEKMDGTEELLVKLNREDLLRKQRTFDNGSIPHQIHLGELHAILRRQEDFYPFLKDNREKIEKILTFRIPYYVGPLARGNSRFAWMTRKSEETITPWNFEEVVDKGASAQSFIERMTNFDKNLPNEKVLPKHSLLYEYFTVYNELTKVKYVTEGMRKPAFLSGEQKKAIVDLLFKTNRKVTVKQLKEDYFKKIECFDSVEISGVEDRFNASLGAYHDLLKIIKDKDFLDNEENEDILEDIVLTLTLFEDRGMIEERLKTYAHLFDDKVMKQLKRRRYTGWGRLSRKLINGIRDKQSGKTILDFLKSDGFANRNFMQLIHDDSLTFKEDIQKAQVSGQGHSLHEQIANLAGSPAIKKGILQTVKIVDELVKVMGHKPENIVIEMARENQTTQKGQKNSRERMKRIEEGIKELGSQILKEHPVENTQLQNEKLYLYYLQNGRDMYVDQELDINRLSDYDVDHIVPQSFIKDDSIDNKVLTRSDKNRGKSDNVPSEEVVKKMKNYWRQLLNAKLITQRKFDNLTKAERGGLSELDKAGFIKRQLVETRQITKHVAQILDSRMNTKYDENDKLIREVKVITLKSKLVSDFRKDFQFYKVREINNYHHAHDAYLNAVVGTALIKKYPKLESEFVYGDYKVYDVRKMIAKSEQEIGKATAKYFFYSNIMNFFKTEITLANGEIRKRPLIETNGETGEIVWDKGRDFATVRKVLSMPQVNIVKKTEVQTGGFSKESILPKRNSDKLIARKKDWDPKKYGGFDSPTVAYSVLVVAKVEKGKSKKLKSVKELLGITIMERSSFEKNPIDFLEAKGYKEVKKDLIIKLPKYSLFELENGRKRMLASAGELQKGNELALPSKYVNFLYLASHYEKLKGSPEDNEQKQLFVEQHKHYLDEIIEQISEFSKRVILADANLDKVLSAYNKHRDKPIREQAENIIHLFTLTNLGAPAAFKYFDTTIDRKRYTSTKEVLDATLIHQSITGLYETRIDLSQLGGD

SEQ ID NO: 3 - DNA, 4212 bp, synthetic construct
  misc_feature 1..4212: note = Synthetic polynucleotide
  source 1..4212: mol_type = other DNA
atggataaaaagtattctattggtttagacatcggcactaattccgttggatgggctgtcataaccgatgaatacaaagtaccttcaaagaaatttaaggtgttggggaacacagaccgtcattcgattaaaaagaatcttatcggtgccctcctattcgatagtggcgaaacggcagaggcgactcgcctgaaacgaaccgctcggagaaggtatacacgtcgcaagaaccgaatatgttacttacaagaaatttttagcaatgagatggccaaagttgacgattctttctttcaccgtttggaagagtccttccttgtcgaagaggacaagaaacatgaacggcaccccatctttggaaacatagtagatgaggtggcatatcatgaaaagtacccaacgatttatcacctcagaaaaaagctagttgactcaactgataaagcggacctgaggttaatctacttggctcttgcccatatgataaagttccgtgggcactttctcattgagggtgatctaaatccggacaactcggatgtcgacaaactgttcatccagttagtacaaacctataatcagttgtttgaagagaaccctataaatgcaagtggcgtggatgcgaaggctattcttagcgcccgcctctctaaatcccgacggctagaaaacctgatcgcacaattacccggagagaagaaaaatgggttgttcggtaaccttatagcgctctcactaggcctgacaccaaattttaagtcgaacttcgacttagctgaagatgccaaattgcagcttagtaaggacacgtacgatgacgatctcgacaatctactggcacaaattggagatcagtatgcggacttatttttggctgccaaaaaccttagcgatgcaatcctcctatctgacatactgagagttaatactgagattaccaaggcgccgttatccgcttcaatgatcaaaaggtacgatgaacatcaccaagacttgacacttctcaaggccctagtccgtcagcaactgcctgagaaatataaggaaatattctttgatcagtcgaaaaacgggtacgcaggttatattgacggcggagcgagtcaagaggaattctacaagtttatcaaacccatattagagaagatggatgggacggaagagttgcttgtaaaactcaatcgcgaagatctactgcgaaagcagcggactttcgacaacggtagcattccacatcaaatccacttaggcgaattgcatgctatacttagaaggcaggaggatttttatccgttcctcaaagacaatcgtgaaaagattgagaaaatcctaacctttcgcataccttactatgtgggacccctggcccgagggaactctcggttcgcatggatgacaagaaagtccgaagaaacgattactccatggaattttgaggaagttgtcgataaaggtgcgtcagctcaatcgttcatcgagaggatgaccaactttgacaagaatttaccgaacgaaaaagtattgcctaagcacagtttactttacgagtatttcacagtgtacaatgaactcacgaaagttaagtatgtcactgagggcatgcgtaaacccgcctttctaagcggagaacagaagaaagcaatagtagatctgttattcaagaccaaccgcaaagtgacagttaagcaattgaaagaggactactttaagaaaattgaatgcttcgattctgtcgagatctccggggtagaagatcgatttaatgcgtcacttggtacgtatcatgacctcctaaagataattaaagataaggacttcctggataacgaagagaatgaagatatcttagaagatatagtgttgactcttaccctctttgaagatcgggaaatgattgaggaaagactaaaaacatacgctcacctgttcgacgataaggttatgaaacagttaaagaggcgtcgctatacgggctggggacgattgtcgcggaaacttatcaacgggataagagacaagcaaagtggtaaaactattctcgattttctaaagagcgacggcttcgccaataggaactttatgcagctgatccatgatgactctttaaccttcaaagaggatatacaaaaggcacaggtttccggacaaggggactcattgcacgaacatattgcgaatcttgctggttcgccagccatcaaaaagggcatactccagacagtcaaagtagtggatgagctagttaaggtcatgggacgtcacaaaccggaaaacattgtaatcgagatggcacgcgaaaatcaaacgactcagaaggggcaaaaaaacagtcgagagcggatgaagagaatagaagagggtattaaagaactgggcagccagatcttaaaggagcatcctgtggaaaatacccaattgcagaacgagaaactttacctctattacctacaaaatggaagggacatgtatgttgatcaggaactggacataaaccgtttatctgattacgacgtcgatcacattgtaccccaatcctttttgaaggacgattcaatcgacaataaagtgcttacacgctcggataagaaccgagggaaaagtgacaatgttccaagcgaggaagtcgtaaagaaaatgaagaactattggcggcagctcctaaatgcgaaactgataacgcaaagaaagttcgataacttaactaaagctgagaggggtggcttgtctgaacttgacaaggccggatttattaaacgtcagctcgtggaaacccgccaaatcacaaagcatgttgcacagatactagattcccgaatgaatacgaaatacgacgagaacgataagctgattcgggaagtcaaagtaatcactttaaagtcaaaattggtgtcggacttcagaaaggattttcaattctataaagttagggagataaataactaccaccatgcgcacgacgcttatcttaatgccgtcgtagggaccgcactcattaagaaatacccgaagctagaaagtgagtttgtgtatggtgattacaaagtttatgacgtccgtaagatgatcgcgaaaagcgaacaggagataggcaaggctacagccaaatacttcttttattctaacattatgaatttctttaagacggaaatcactctggcaaacggagagatacgcaaacgacctttaattgaaaccaatggggagacaggtgaaatcgtatgggataagggccgggacttcgcgacggtgagaaaagttttgtccatgccccaagtcaacatagtaaagaaaactgaggtgcagaccggagggttttcaaaggaatcgattcttccaaaaaggaatagtgataagctcatcgctcgtaaaaaggactgggacccgaaaaagtacggtggcttcgatagccctacagttgcctattctgtcctagtagtggcaaaagttgagaagggaaaatccaagaaactgaagtcagtcaaagaattattggggataacgattatggagcgctcgtcttttgaaaagaaccccatcgacttccttgaggcgaaaggttacaaggaagtaaaaaaggatctcataattaaactaccaaagtatagtctgtttgagttagaaaatggccgaaaacggatgttggctagcgccggagagcttcaaaaggggaacgaactcgcactaccgtctaaatacgtgaatttcctgtatttagcgtcccattacgagaagttgaaaggttcacctgaagataacgaacagaagcaactttttgttgagcagcacaaacattatctcgacgaaatcatagagcaaatttcggaattcagtaagagagtcatcctagctgatgccaatctggacaaagtattaagcgcatacaacaagcacagggataaacccatacgtgagcaggcggaaaatattatccatttgtttactcttaccaacctcggcgctccagccgcattcaagtattttgacacaacgatagatcgcaaacgatacacttctaccaaggaggtgctagacgcgacactgattcaccaatccatcacgggattatatgaaactcggatagatttgtcacagcttgggggtgacggatcccccaagaagaagaggaaagtctcgagcgactacaaagaccatgacggtgattataaagatcatgacatcgattacaaggatgacgatgacaaggctgcagga

SEQ ID NO: 4 - protein, 1368 aa, synthetic construct
  REGION 1..1368: note = Synthetic polypeptide
MDKKYSIGLAIGTNSVGWAVITDEYKVPSKKFKVLGNTDRHSIKKNLIGALLFDSGETAEATRLKRTARRRYTRRKNRICYLQEIFSNEMAKVDDSFFHRLEESFLVEEDKKHERHPIFGNIVDEVAYHEKYPTIYHLRKKLVDSTDKADLRLIYLALAHMIKFRGHFLIEGDLNPDNSDVDKLFIQLVQTYNQLFEENPINASGVDAKAILSARLSKSRRLENLIAQLPGEKKNGLFGNLIALSLGLTPNFKSNFDLAEDAKLQLSKDTYDDDLDNLLAQIGDQYADLFLAAKNLSDAILLSDILRVNTEITKAPLSASMIKRYDEHHQDLTLLKALVRQQLPEKYKEIFFDQSKNGYAGYIDGGASQEEFYKFIKPILEKMDGTEELLVKLNREDLLRKQRTFDNGSIPHQIHLGELHAILRRQEDFYPFLKDNREKIEKILTFRIPYYVGPLARGNSRFAWMTRKSEETITPWNFEEVVDKGASAQSFIERMTNFDKNLPNEKVLPKHSLLYEYFTVYNELTKVKYVTEGMRKPAFLSGEQKKAIVDLLFKTNRKVTVKQLKEDYFKKIECFDSVEISGVEDRFNASLGTYHDLLKIIKDKDFLDNEENEDILEDIVLTLTLFEDREMIEERLKTYAHLFDDKVMKQLKRRRYTGWGRLSRKLINGIRDKQSGKTILDFLKSDGFANRNFMQLIHDDSLTFKEDIQKAQVSGQGDSLHEHIANLAGSPAIKKGILQTVKVVDELVKVMGRHKPENIVIEMARENQTTQKGQKNSRERMKRIEEGIKELGSQILKEHPVENTQLQNEKLYLYYLQNGRDMYVDQELDINRLSDYDVDHIVPQSFLKDDSIDNKVLTRSDKNRGKSDNVPSEEVVKKMKNYWRQLLNAKLITQRKFDNLTKAERGGLSELDKAGFIKRQLVETRQITKHVAQILDSRMNTKYDENDKLIREVKVITLKSKLVSDFRKDFQFYKVREINNYHHAHDAYLNAVVGTALIKKYPKLESEFVYGDYKVYDVRKMIAKSEQEIGKATAKYFFYSNIMNFFKTEITLANGEIRKRPLIETNGETGEIVWDKGRDFATVRKVLSMPQVNIVKKTEVQTGGFSKESILPKRNSDKLIARKKDWDPKKYGGFDSPTVAYSVLVVAKVEKGKSKKLKSVKELLGITIMERSSFEKNPIDFLEAKGYKEVKKDLIIKLPKYSLFELENGRKRMLASAGELQKGNELALPSKYVNFLYLASHYEKLKGSPEDNEQKQLFVEQHKHYLDEIIEQISEFSKRVILADANLDKVLSAYNKHRDKPIREQAENIIHLFTLTNLGAPAAFKYFDTTIDRKRYTSTKEVLDATLIHQSITGLYETRIDLSQLGGD

SEQ ID NO: 5 - protein, 5 aa, synthetic construct
  REGION 1..5: note = Synthetic polypeptide
GGGGS

SEQ ID NO: 6 - protein, 5 aa, synthetic construct
  REGION 1..5: note = Synthetic polypeptide
EAAAK

SEQ ID NO: 7 - protein, 16 aa, synthetic construct
  REGION 1..16: note = Synthetic polypeptide
SGSETPGTSESATPES

SEQ ID NO: 8 - protein, 1368 aa, synthetic construct
  REGION 1..1368: note = Synthetic polypeptide
MDKKYSIGLAIGTNSVGWAVITDEYKVPSKKFKVLGNTDRHSIKKNLIGALLFDSGETAEATRLKRTARRRYTRRKNRICYLQEIFSNEMAKVDDSFFHRLEESFLVEEDKKHERHPIFGNIVDEVAYHEKYPTIYHLRKKLVDSTDKADLRLIYLALAHMIKFRGHFLIEGDLNPDNSDVDKLFIQLVQTYNQLFEENPINASGVDAKAILSARLSKSRRLENLIAQLPGEKKNGLFGNLIALSLGLTPNFKSNFDLAEDAKLQLSKDTYDDDLDNLLAQIGDQYADLFLAAKNLSDAILLSDILRVNTEITKAPLSASMIKRYDEHHQDLTLLKALVRQQLPEKYKEIFFDQSKNGYAGYIDGGASQEEFYKFIKPILEKMDGTEELLVKLNREDLLRKQRTFDNGSIPHQIHLGELHAILRRQEDFYPFLKDNREKIEKILTFRIPYYVGPLARGNSRFAWMTRKSEETITPWNFEEVVDKGASAQSFIERMTNFDKNLPNEKVLPKHSLLYEYFTVYNELTKVKYVTEGMRKPAFLSGEQKKAIVDLLFKTNRKVTVKQLKEDYFKKIECFDSVEISGVEDRFNASLGTYHDLLKIIKDKDFLDNEENEDILEDIVLTLTLFEDREMIEERLKTYAHLFDDKVMKQLKRRRYTGWGRLSRKLINGIRDKQSGKTILDFLKSDGFANRNFMQLIHDDSLTFKEDIQKAQVSGQGDSLHEHIANLAGSPAIKKGILQTVKVVDELVKVMGRHKPENIVIEMARENQTTQKGQKNSRERMKRIEEGIKELGSQILKEHPVENTQLQNEKLYLYYLQNGRDMYVDQELDINRLSDYDVDAIVPQSFLKDDSIDNKVLTRSDKNRGKSDNVPSEEVVKKMKNYWRQLLNAKLITQRKFDNLTKAERGGLSELDKAGFIKRQLVETRQITKHVAQILDSRMNTKYDENDKLIREVKVITLKSKLVSDFRKDFQFYKVREINNYHHAHDAYLNAVVGTALIKKYPKLESEFVYGDYKVYDVRKMIAKSEQEIGKATAKYFFYSNIMNFFKTEITLANGEIRKRPLIETNGETGEIVWDKGRDFATVRKVLSMPQVNIVKKTEVQTGGFSKESILPKRNSDKLIARKKDWDPKKYGGFDSPTVAYSVLVVAKVEKGKSKKLKSVKELLGITIMERSSFEKNPIDFLEAKGYKEVKKDLIIKLPKYSLFELENGRKRMLASAGELQKGNELALPSKYVNFLYLASHYEKLKGSPEDNEQKQLFVEQHKHYLDEIIEQISEFSKRVILADANLDKVLSAYNKHRDKPIREQAENIIHLFTLTNLGAPAAFKYFDTTIDRKRYTSTKEVLDATLIHQSITGLYETRIDLSQLGGD

SEQ ID NO: 9 - protein, 1368 aa, Streptococcus pyogenes [sequence omitted]

SEQ ID NO: 10 - protein, 1359 aa, Streptococcus pyogenes
MDKKYSIGLDIGTNSVGWAVITDEYKVPSKKFKVLGNTDRHSIKKNLIGALLFDSGETAEATRLKRTARRRYTRRKNRICYLQEIFSNEMAKVDDSFFHRLEESFLVEEDKKHERHPIFGNIVDEVAYHEKYPTIYHLRKKLVDSTDKADLRLIYLALAHMIKFRGHFLIEGDLNPDNSDVDKLFIQLVQTYNQLFEENINASGVDAKAILSARLSKSRRLENLIAQLPGEKKNGLFGNLIALSLGLTPNFKSNFDLAEDAKLQLSKDTYDDDLDNLLAQIGDQYADLFLAAKNLSDAILLSDILRVNTEITKAPLSASMIKRYDEHHQDLTLLKALVRQQLPEKYKEIFFDQSKNGYAGYIDGGASQEEFYKFIKPILEKMDGTEELLVKLNREDLLRKQRTFDNGSIPHQIHLGELHAILRRQEDFYPFLKDNREKIEKILTFRIPYYVGPLARGNSRFAWMTRKSEETITPWNFEEVVDKGASAQSFIERMTNFDKNLPNEKVLPKHSLLYEYFTVYNELTKVKYVTEGMRKPAFLSGEQKKAIVDLLFKTNRKVTVKQLKEDYFKKIECFDSVEISGVEDRFNASLGTYHDLLKIIKDKDFLDNEENEDILEDIVLTLTLFEDREMIEERLKTYAHLFDDKVMKQLKRRRYTGWGRLSRKLINGIRDKQSGKTILDFLKDGFANRNFMQLIHDDSLTFKEDIQKAQVSGQGDSLHEHIANLAGSPAIKKGILQTVKVVDELVKVMGRHKPENIVIEMARENQTTQKGQKNSRERMKRIEEGIKELGSQILKEHPVENTQLQNEKLYLYYLQNGRDMYVDQELDINRLSDYDVDHIVPQSFLKDDSIDNKVLTRSDKNRGKSDNVPSEEVVKKMKNYWRQLLNAKLITQRKFDNLTKAERGGLSELDKAGFIKRQLVETRQITKHVAQILDSRMNTKYDENDKLIREVKVITLKSKLVSDFRKDFQFYKVREINNYHHAHDAYLNAVVGTALIKKYPKLESEFVYGDYKVYDVSEQEIGKATAKYFFYSNIMNFFKTEITLANGEIRKRPLIETNGETGEIVWDKGRDFATVRKVLSMPQVNIVKKTEVQTGGFSKESILPKRNSDKLIARKKDWDPKKYGGFDSPTVAYSVLVVAKVEKGKSKKLKSVKELLGITIMERSSFEKNPIDFLEAKGYKEVKKDLIIKLPKYSLFELENGRKRMLASGELQKGNELALPSKYVNFLYLASHYEKLKGSPEDNEQKQLFVEQHKHYLDEIIEQISEFSKRVILADANLDKVLSAYNKHRDKPIREQAENIIHLFTLTNLGAPAAFKYFDTTIDRKRYTSTKEVLDATLIHQSITGLYETRIDLSQLGGD

SEQ ID NO: 11 - protein, 1355 aa, Streptococcus gallolyticus
MTKKNYSIGLDIGTNSVGWAVITDDYKVPAKKMKVLGNTDKKYIKKNLLGALLFDSGETAEATRLKRTARRRYTRRKNRLRYLQEIFANEIAKVDESFFQRLDESFLTDDDKTFDSHPIFGNKAEEDAYHQKFPTIYHLRKHLADSSEKADLRLVYLALAHMIKFRGHFLIEGELNAENTDVQKIFADFVGVYNRTFDDSHLSEITVDVASILTEKISKSRRLENLIKYYPTEKKNTLFGNLIALALGLQPNFKTNFKLSEDAKLQFSKDTYEEDLEELLGKIGDDYADLFTSAKNLYDAILLSGILTVDDNSTKAPLSASMIKRYVEHHEDLEKLKEFIKANKSELYHDIFKDKNKNGYAGYIENGVKQDEFYKYLKNILSKIKIDGSDYFLDKIEREDFLRKQRTFDNGSIPHQIHLQEMHAILRRQGDYYPFLKEKQDRIEKILTFRIPYYVGPLVRKDSRFAWAEYRSDEKITPWNFDKVIDKEKSAEKFITRMTLNDLYLPEEKVLPKHSHVYETYAVYNELTKIKYVNEQGKESFFDSNMKQEIFDHVFKENRKVTKEKLLNYLNKEFPEYRIKDLIGLDKENKSFNASLGTYHDLKKILDKAFLDDKVNEEVIEDIIKTLTLFEDKDMIHERLQKYSDIFTANQLKKLERRHYTGWGRLSYKLINGIRNKENNKTILDYLIDDGSANRNFMQLINDDTLPFKQIIQKSQVVGDVDDIEAVVHDLPGSPAIKKGILQSVKIVDELVKVMGGNPDNIVIEMARENQTTNRGRSQSQQRLKKLQNSLKPSYIEDKVENSHLQNDQLFLYYIQNGKDMYTGDELDIDHLSDYDIDHIIPQAFIKDDSIDNRVLTSSAKNRGKSDDVPSLDIVRARKAEWVRLYKSGLISKRKFDNLTKAERGGLTEADKAGFIKRQLVETRQITKHVAQILDARFNTEHDENDKVIRDVKVITLKSNLVSQFRKDFEFYKVREINDYHHAHDAYLNAVVGTALLKKYPKLASEFVYGEYKKYDISSDKATAKYFFYSNLMNFFKTKVKYADGTVFERPIIETNADGEIAWNKQIDFEKVRKVLSYPQVNIVKKVETQTGGFSKESILPKGDSDKLIPRKTKKVYWDTKKYGGFDSPTVAYSVFVVADVEKGKAKKLKTVKELVGISIMERSFFEENPVEFLENKGYHNIREDKLIKLPKYSLFEFEGGRRRLLASASELQKGNEMVLPGYLVELLYHAHRADNFNSTEYLNYVSEHKKEFEKVLSCVEDFANLYVDVEKNLSKIRAVADSMDNFSIEEISNSFINLLTLTALGAPADFNFLGEKIPRKRYTSTKECLNATLIHQSITGLYETRIDLSKLGEE

SEQ ID NO: 12 - protein, 1359 aa, Streptococcus mitis
KKGYSIGLDIGTNSVGFAVITDDYKVPSKKMKVLGNTDKRFIKKNLIGALLFDEGTTAEARRLKRTARRRYTRRKNRLRYLQEIFSEEMSKVDSSFFHRLDDSFLIPEDKRESKYPIFATLTEEKEYHKQFPTIYHLRKQLADSKEKTDLRLIYLALAHMIKYRGHFLYEEAFDIKNNDIQKIFNEFISIYDNTFEGSSLSGQNAQVEAIFTDKISKSAKRERVLKLFPDEKSTGLFSEFLKLIVGNQADFKKHFDLEDKAPLQFSKDTYDEDLENLLGQIGDDFTDLFVSAKKLYDAILLSGILTVTDPSTKAPLSASMIERYENHQNDLAALKQFIKNNLPEKYDEVFSDQSKDGYAGYIDGKTTQETFYKYIKNLLSKFEGTDYFLDKIEREDFLRKQRTFDNGSIPHQIHLQEMNAILRRQGEYYPFLKDNKEKIEKILTFRIPYYVGPLARGNRDFAWLTRNSDEAIRPWNFEEIVDKASSAEDFINKMTNYDLYLPEEKVLPKHSLLYETFAVYNELTKVKFIAEGLRDYQFLDSGQKKQIVNQLFKENRKVTEKDIIHYLHNVDGYDGIELKGIEKQFNASLSTYHDLLKIIKDKEFMDDAKNEAILENIVHTLTIFEDREMIKQRLAQYDSLFDEKVIKALTRRHYTGWGKLSAKLINGICDKQTGNTILDYLIDDGKINRNFMQLINDDGLSFKEIIQKAQVIGKTDDVKQVVQELSGSPAIKKGILQSIKIVDELVKVMGHAPESIVIEMARENQTTARGKKNSQQRYKRIEDSLKILASNILKENPTDNNQLQNDRLFLYYLQNGKDMYTGEALDINQLSSYDIDHIIPQAFIKDDSLDNRVLTSSKDNRGKSDNVPSIEVVQKRKAFWQQLLDSKLISERKFNNLTKAERGGLDERDKVGFIKRQLVETRQITKHVAQILDARYNTEVNEKDKKNRTVKIITLKSNLVSNFRKEFRLYKVREINDYHHAHDAYLNAVVAKAILKKYPKLEPEFVYGEYQKYDLSKDPKEVEKATEKYFFYSNLLNFFKEEVHYADGTIVKRENIEYSKDTGEIAWNKEKDFAIIKKVLSLPQVNIVKKREVQTGGFSKESILPKGNSDKLIPRKTKDILLDTTKYGGFDSPVIAYSILLIADIEKGKAKKLKTVKTLVGITIMEKAAFEENPITFLENKGYHNVRKENILCLPKYSLFELENGRRRLLASAKELQKGNEIVLPVYLTTLLYHSKNVHKLDEPGHLEYIQKHRNEFKDLLNLVSEFSQKYVLADANLEKIKSLYADNEQADIEILANSFINLLTFTALGAPAAFKFFGKDIDRKRYTTVSEILNATLIHQSITGLYETWIDLSKLGED

SEQ ID NO: 13 - protein, 986 aa, Staphylococcus aureus
MKRNYILGLDIGITSVGYGIIDYETRDVIDAGVRLFKEANVENNEGRRSKRGARRLKRRRRHRIQRVKKLLFDYNLLTDHSELSGNPYEARVKGLSQKLSEEEFSAALLHLAKRRGVHNVNEVEEDTGNELSTKEQISRNSKLEEKYVAELQLERLKKDGEVRGSINRKTSDYVKEAKQLLKVQKAYHQLDQSFIDTYIDLLETRRTYYEGPGEGSPFGWKDIKEWYEMLMGHCTYFPEELRSVKYAYNADLYNALNDLNNLVITRDENEKLEYYEKFQIIENVFKQKKKPTLKQIAKEILVNEEDIKGYRVTSTGKPEFTNLKVYHDIKDITARKENAELLDQIAKILTIYQSSEDIQEELTNLNSELTQEEIEQISNLKGYTGTHNLSLKAINLILDELWTNDNQIAIFNRLKLVPKKVDLSQQKEIPTTLVDDFILSPVVKRSFIQSIKVINAIIKKYGLPNDIIIELAREKNSKDAQKMINEMQKQTNEEIIRTTGKENAKYLIEKIKLHDMQEGKCLYSLEAIPLEDLLNNPFNYEVDHIIPRSVSFDNSFNNKVLVKQEEASKKGNRTPFQYLSSSDSKISYETFKKHILNLAKGKGRISKTKKEYLLEERDQKDFINRNLVDTRYATRGLMNLLRSYFRVNNLDVKVKSINGGFTSFLRRKWKFKKERNKGYKHHAEDALIIANADFIFKEWKKLDKNQMFEEKETEQEYKEIFITPHQIKHIKDFKDYKYSHRVDKKPNREVNNLNGLYDKDNDKLKKLINKSPEKLLMYHHDPQTYQKKLIMEQYGDEKNLYKYYEETGNYLTKYSKKDNGPVIKKIKYYGNKLNAHLDITDDYPNSVKLSLKPYRFDVYLDNGVYKFVTVKNLDVIKKENYYEVNSKAYEEAKKKKISNQAEFIASFYNNDLIKINGELYRVIGVNNDLLNRIEVNMIDITYREYLENMNDKRPPRIIKTIASKTQSIKKLYEVKSKKHPQIIKKG

SEQ ID NO: 14 - protein, 1044 aa, Streptococcus pyogenes
LSASMIKRYDEHHQDLTLLKALVRQQLPEKYKEIFFDQSKNGYAGYIDGGASQEEFYKFIKPILEKMDGTEELLAKLNREDLLRKQRTFDNGSIPHQIHLGELHAILRRQEDFYPFLKDNREKIEKILTFRIPYYVGPLARGNSRFAWMTRKSEETITPWNFEEVVDKGASAQSFIERMTNFDKNLPNEKVLPKHSLLYEYFTVYNELTKVKYVTEGMRKPAFLSGEQKKAIVDLLFKTNRKVTVKQLKEDYFKKIECFDSVEISGVEDRFNASLGTYHDLLKIIKDKDFLDNEENEDILEDIVLTLTLFEDREMIEERLKTYAHLFDDKVMKQLKRRRYTGWGRLSRKLINGIRDKQSGKTILDFLKDGFANRNFMQLIHDDSLTFKEDLQKAQVSGQGDSLHEHIANLAGSPAIKKGILQTVKVVDELVKVMGRHKPENIVIEMARENQTTQKGQKNSRERMKRIEEGIKELGSDILKEYPVENTQLQNEKLYLYYLQNGRDMYVDQELDINRLSDYDVDHIVPQSFLKDDSIDNKVLTRSDKNRGKSDNVPSEEVVKKMKNYWKQLLNAKLITQRKFDNLTKAERGGLSELDKAGFIKRQLVETRQITKHVAQILDSRMNTKYDENDKLIREVRVITLKSKLVSDFRKDFQFYKVREINNYHHAHDAYLNAVVGTALIKKYPKLESEFVYGDYKVYDISEQEIGKATAKYFFYSNIMNFFKTEITLANGEIRKRPLIETNGETGEIVWDKGRDFATVRKVLSMPQVNIVKKTEVQTGGFSKESILPKRNSDKLIARKKDWDPKKYGGFDSPTVAYSVLVVAKVEKGKSKKLKSVKELVGITIMERSSFEKDPVDFLEAKGYKEVRKDLIIKLPKYSLFELENGRKRMLASGELQKGNELALPSKYVNFLYLASHYEKLKGSPEDNEQKQLFVEQHKHYLDEIIEQISEFSKRVILADANLDKVLSAYNKHRDKPIREQAENIIHLFTLTNLGAPAAFKCFDTTIGRNRYKSIKEVLDATLIHQSITGLYETRIDLSQLGGD

SEQ ID NO: 15 - protein, 1359 aa, Streptococcus pyogenes; identical to SEQ ID NO: 10

SEQ ID NO: 16 - protein, 1359 aa, Streptococcus pyogenes
MDKKYSIGLDIGTNSVGWAVITDDYKVPSKKLKGLGNTDRHGIKKNLIGALLFDSGETAEATRLKRTARRRYTRRKNRICYLQEIFSNEMAKVDDSFFHRLEESFLVEEDKKHERHPIFGNIVDEVAYHEKYPTIYHLRKKLADSTDKVDLRLIYLALAHMIKFRGHFLIEGDLNPDNSDVDKLFIQLVQTYNQLFEENINASRVDAKAILSARLSKSRRLENLIAQLPGEKKNGLFGNLIALSLGLTPNFKSNFDLAEDAKLQLSKDTYDDDLDNLLAQIGDQYADLFLAAKNLSDATLLSDILRVNSEITKAPLSASMIKRYDEHHQDLTLLKALVRQQLPEKYKEIFFDQSKNGYAGYIDGGASQEEFYKFIKPILEKMDGTEELLAKLNREDLLRKQRTFDNGSIPYQIHLGELHAILRRQEDFYPFLKDNREKIEKILTFRIPYYVGPLARGNSRFAWMTRKSEETITPWNFEEVVDKGASAQSFIERMTNFDKNLPNEKVLPKHSLLYEYFTVYNELTKVKYVTEGMRKPAFLSGEQKKAIVDLLFKTNRKVTVKQLKEDYFKKIECFDSVEISGVEDRFNASLGTYHDLLKIIKDKDFLDNEENEDILEDIVLTLTLFEDREMIEERLKTYAHLFDDKVMKQLKRRRYTGWGRLSRKLINGIRDKQSGKTILDFLKDGFANRNFMQLIHDDSLTFKEDIQKAQVSGQGDSLHEHIANLAGSPAIKKGILQTVKVVDELVKVMGRHKPENIVIEMARENQTTQKGQKNSRERMKRIEEGIKELGSDILKEYPVENTQLQNEKLYLYYLQNGRDMYVDQELDINRLSDYDVDHIVPQSFLKDDSIDNKVLTRSDKNRGKSDNVPSEEVVKKMKNYWRQLLNAKLITQRKFDNLTKAERGGLSELDKVGFIKRQLVETRQITKHVAQILDSRMNTKYDENDKLIREVRVITLKSKLVSDFRKDFQFYKVREINNYHHAHDAYLNAVVGTALIKKYPKLESEFVYGDYKVYDVSEQEIGKATAKYFFYSNIMNFFKTEITLANGEIRKRPLIETNGETGEIVWDKGRDFATVRKVLSMPQVNIVKKTEVQTGGFSKESILPKRNSDKLIARKKDWDPKKYGGFDSPTVAYSVLVVAKVEKGKSKKLKSVKELLGITIMERSSFEKDPIDFLEAKGYKEVRKDLIIKLPKYSLFELENGRKRMLASGELQKGNELALPSKYVNFLYLASHYEKLKGSPEDNEQKQLFVEQHKHYLDEIIEQISEFSKRVILADANLDKVLSAYNKHRDKPIREQAENIIHLFTLTNLGAPAAFKYFDTTIDRKRYTSTKEVLDATLIHQSITGLYETRIDLSQLGGD

SEQ ID NO: 17 - protein, 1359 aa, Streptococcus pyogenes
MDKKYSIGLDIGTNSVGWAVITDDYKVPSKKFKVLGNTDRHSIKKNLIGALLFDSGETAEATRLKRTARRRYTRRKNRICYLQEIFSNEMAKVDDSFFHRLEESFLVEEDKKHERHPIFGNIVDEVAYHEKYPTIYHLRKKLVDSTDKADLRLIYLALAHMIKFRGHFLIEGDLNPDNSDVDKLFIQLVQTYNQLFEENINASGVDAKAILSARLSKSRRLENLIAQLPGEKKNGLFGNLIALSLGLTPNFKSNFDLAEDAKLQLSKDTYDDDLDNLLAQIGDQYADLFLAAKNLSDAILLSDILRLNSEITKAPLSASMIKRYDEHHQDLTLLKALVRQQLPEKYKEIFFDQSKNGYAGYIDGGASQEEFYKFIKPILEKMDGTEELLAKLNREDLLRKQRTFDNGSIPHQIHLGELHAILRRQEDFYPFLKDNREKIEKILTFRIPYYVGPLARGNSRFAWMTRKSEETITPWNFEEVVDKGASAQSFIERMTNFDKNLPNEKVLPKHSLLYEYFTVYNELTKVKYVTEGMRKPAFLSGEQKKAIVDLLFKTNRKVTVKQLKEDYFKKIECFDSVEISGVEDRFNASLGTYHDLLKIIKDKDFLDNEENEDILEDIVLTLTLFEDREMIEERLKTYAHLFDDKVMKQLKRRRYTGWGRLSRKLINGIRDKQSGKTILDFLKDGFANRNFMQLIHDDSLTFKEDIQKAQVSGQGDSLHEHIANLAGSPAIKKGILQTVKVVDELVKVMGRHKPENIVIEMARENQTTQKGQKNSRERMKRIEEGIKELGSQILKEHPVENTQLQNEKLYLYYLQNGRDMYVDQELDINRLSDYDVDHIVPQSFIKDDSIDNKVLTRSDKNRGKSNNVPSEEVVKKMKNYWRQLLNAKLITQRKFDNLTKAERGGLSELDKAGFIKRQLVETRQITKHVAQILDSRMNTKYDENDKLIREVKVITLKSKLVSDFRKDFQFYKVREINNYHHAHDAYLNAVVGTALIKKYPKLESEFVYGDYKVYDVSEQEIGKATAKYFFYSNIMNFFKTEITLANGEIRKRPLIETNGETGEIVWDKGRDFATVRKVLSMPQVNIVKKTEVQTGGFSKESILPKRNSDKLIARKKDWDPKKYGGFDSPTVAYSVLVVAKVEKGKSKKLKSVKELLGITIMERSSFEKNPIDFLEAKGYKEVRKDLIVKLPKYSLFELENGRKRMLASGELQKGNELALPSKYVNFLYLASHYEKLKGSPEDNEQKQLFVEQHKHYLDEIIEQISEFSKRVILADANLDKVLSAYNKHRDKPIREQAENIIHLFTLTNLGAPAAFKYFDTTIDRKRYTSTKEVLDATFIHQSITGLYETRIDLSQLGGD

SEQ ID NO: 18 - protein, 1359 aa, Streptococcus pyogenes
MDKKYSIGLDIGTNSVGWAVITDDYKVPSKKFKVLGNTDRHSIKKNLIGALLFDSGETAEATRLKRTARRRYTRRKNRICYLQEIFSNEMAKVDDSFFHRLEESFLVEEDKKHERHPIFGNIVDEVAYHEKYPTIYHLRKKLVDSTDKADLRLIYLALAHMIKFRGHFLIEGDLNPDNSDVDKLFIQLVQTYNQLFEENINASGVDAKAILSARLSKSRRLENLIAQLPGEKKNGLFGNLIALSLGLTPNFKSNFDLAEDAKLQLSKDTYDDDLDNLLAQIGDQYADLFLAAKNLSDAILLSDILRVNTEITKAPLSASMIKRYDEHHQDLTLLKALVRQQLPEKYKEIFFDQSKNGYAGYIDGGASQEEFYKFIKPILEKMDGTEELLVKLNREDLLRKQRTFDNGSIPHQIHLGELHAILRRQEDFYPFLKDNREKIEKILTFRIPYYVGPLARGNSRFAWMTRKSEETITPWNFEEVVDKGASAQSFIERMTNFDKNLPNEKVLPKHSLLYEYFTVYNELTKVKYVTEGMRKPAFLSGEQKKAIVDLLFKTNRKVTVKQLKEDYFKKIECFDSVEISGVEDRFNASLGTYHDLLKIIKDKDFLDNEENEDILEDIVLTLTLFEDREMIEERLKTYAHLFDDKVMKQLKRRRYTGWGRLSRKLINGIRDKQSGKTILDFLKDGFANRNFMQLIHDDSLTFKEDIQKAQVSGQGDSLHEHIANLAGSPAIKKGILQTVKVVDELVKVMGRHKPENIVIEMARENQTTQKGQKNSRERMKRIEEGIKELGSQILKEHPVENTQLQNEKLYLYYLQNGRDMYVDQELDINRLSDYDVDHIVPQSFLKDDSIDNKVLTRSDKNRGKSDNVPSEEVVKKMKNYWRQLLNAKLITQRKFDNLTKAERGGLSELDKAGFIKRQLVETRQITKHVAQILDSRMNTKYDENDKLIREVKVITLKSKLVSDFRKDFQFYKVREINNYHHAHDAYLNAVVGTALIKKYPKLESEFVYGDYKVYDVSEQEIGKATAKYFFYSNIMNFFKTEITLANGEIRKRPLIETNGETGEIVWDKGRDFATVRKVLSMPQVNIVKKTEVQTGGFSKESILPKRNSDKLIARKKDWDPKKYGGFDSPTVAYSVLVVAKVEKGKSKKLKSVKELLGITIMERSSFEKNPIDFLEAKGYKEVKKDLIIKLPKYSLFELENGRKRMLASGELQKGNELALPSKYVNFLYLASHYEKLKGSPEDNEQKQLFVEQHKHYLDEIIEQISEFSKRVILADANLDKVLSAYNKHRDKPIREQAENIIHLFTLTNLGAPAAFKYFDTTIDRKRYTSTKEVLDATLIHQSITGLYETRIDLSQLGGD

SEQ ID NO: 19 - protein, 1359 aa, Streptococcus pyogenes
MDKKYSIGLDIGTNSVGWAVITDDYKVPSKKFKVLGNTDRHSIKKNLIGALLFDSGEIAEATRLKRTARRRYTRRKNRICYLQEIFSNEMAKVDDSFFHRLEESFLVEEDKKHERHPIFGNIVDEVAYHEKYPTIYHLRKKLVDSTDKADLRLIYLALAHMIKFRGHFLIEGDLNPDNSDVDKLFIQLVQTYNQLFEENINASGVDAKAILSARLSKSRRLENLIAQLPGEKKNGLFGNLIALSLGLTPNFKSNFDLAEDAKLQLSKDTYDDDLDNLLAQIGDQYADLFLAAKNLSDAILLSDILRLNSEITKAPLSASMIKRYDEHHQDLTLLKALVRQQLPEKYKEIFFDQSKNGYAGYIDGGASQEEFYKFIKPILEKMDGTEELLAKLNREDLLRKQRTFDNGSIPHQIHLGELHAILRRQEDFYPFLKDNREKIEKILTFRIPYYVGPLARGNSRFAWMTRKSEETITPWNFEEVVDKGASAQSFIERMTNFDKNLPNEKVLPKHSLLYEYFTVYNELTKVKYVTEGMRKPAFLSGEQKKAIVDLLFKTNRKVTVKQLKEDYFKKIECFDSVEISGVEDRFNASLGTYHDLLKIIKDKDFLDNEENEDILEDIVLTLTLFEDREMIEERLKTYAHLFDDKVMKQLKRRRYTVWGRLSRKLINGIRDKQSGKTILDFLKDGFANRNFMQLIHDDSLTFKEDIQKAQVSGQGDSLHEHIANLAGSPAIKKGILQTVKVVDELVKVMGRHKPENIVIEMARENQTTQKGQKNSRERMKRIEEGIKELGSQILKEHPVENTQLQNEKLYLYYLQNGRDMYVDQELDINRLSDYDVDHIVPQSFIKDDSIDNKVLTRSDKNRGKSDNVPSEEVVKKMKNYWRQLLNAKLITQRKFDNLTKAERGGLSELDKAGFIKRQLVETRQITKHVAQILDSRMNTKYDENDKLIREVKVITLKSKLVSDFRKDFQFYKVREINNYHHAHDAYLNAVVGTALIKKYPKLESEFVYGDYKVYDVSEQEIGKATAKYFFYSNIMNFFKTEITLANGEIRKRPLIETNGETGEIVWDKGRDFATVRKVLSMPQVNIVKKTEVQTGGFSKESILPKRNSDKLIARKKDWDPKKYGGFDSPTVAYSVLVVAKVEKGKSKKLKSVKELLGITIMERSSFEKNPIDFLEAKGYKEVRKDLIIKLPKYSLFELENGRKRMLASGELQKGNELALPSKYVNFLYLASHYEKLKGSPEDNEQKQLFVEQHKHYLDEIIEQISEFSKRVILADANLDKVLSAYNKHRDKPIREQAENIIHLFTLTNLGAPTAFKYFDTTIDRKRYTSTKEVLDATFIHQSITGLYETRIDLSQLGGD

SEQ ID NO: 20 - protein, 1359 aa, Streptococcus pyogenes
MDKKYSIGLDIGTNSVGWAVITDDYKVPSKKFKVLGNTDRHSIKKNLIGALLFDSGETAEATRLKRTARRRYTRRKNRICYLQEIFSNEIAKVDDSFFHRLEESFLVEEDKKHERHPIFGNIVDEVAYHEKYPTIYHLRKKLADSTDKADLRLIYLALAHMIKFRGHFLIEGDLNPDNSDVDKLFIQLVQTYNQLFEENINASRVDAKAILSARLSKSRRLENLIAQLPGEKRNGLFGNLIALSLGLTPNFKSNFDLAEDAKLQLSKDTYDDDLDNLLAQIGDQYADLFLAAKNLSDAILLSDILRVNTEITKAPLSASMIKRYDEHHQDLTLLKALVRQQLPEKYKEIFFDQSKNGYAGYIDGGASQEEFYKFIKPILEKMDGTEELLAKLNREDLLRKQRTFDNGSIPHQIHLGELHAILRRQEDFYPFLKDNREKIEKILTFRIPYYVGPLARGNSRFAWMTRKSEETITPWNFEEVVDKGASAQSFIERMTNFDKNLPNEKVLPKHSLLYEYFTVYNELTKVKYVTEGMRKPAFLSGEQKKAIVDLLFKTNRKVTVKQLKEDYFKKIECFDSVEISGVEDRFNASLGTYHDLLKIIKDKDFLDNEENEDILEDIVLTLTLFEDREMIEERLKTYAHLFDDKVMKQLKRRRYTGWGRLSRKLINGIRDKQSGKTILDFLKDGFANRNFMQLIHDDSLTFKEDLQKAQVSGQGDSLHEHIANLAGSPAIKKGILQTVKVVDELVKVMGRHKPENIVIEMARENQTTQKGQKNSRERMKRIEEGIKELGSDILKEYPVETTQLQNEKLYLYYLQNGRDMYVDQELDINRLSDYDVDHIVPQSFLKDDSIDNKVLTRSDKNRGKSDNVPSEEVVKKMKNYWKQLLNAKLITQRKFDNLTKAERGGLSELDKAGFIKRQLVETRQITKHVAQILDSRMNTKYDENDKLIREVRVITLKSKLVSDFRKDFQFYKVREINNYHHAHDAYLNAVVGTALIKKYPKLESEFVYGDYKVYDISEQEIGKATAKYFFYSNIMNFFKTEITLANGEIRKRPLIETNGETGEIVWDKGRDFATVRKVLSMPQVNIVKKTEVQTGGFSKESILPKRNSDKLIARKKDWDPKKYGGFDSPTVAYSVLVVAKVEKGKSKKLKSVKELVGITIMERSSFEKDPVDFLEAKGYKEVRKDLIIKLPKYSLFELENGRKRMLASGELQKGNELALPSKYVNFLYLASHYEKLKGSPEDNEQKQLFVEQHKHYLDEIIEQISEFSKRVILADANLDKVLSAYNKHRDKPIREQAENIIHLFTLTNLGAPAAFKCFDTTIGRNRYKSIKEVLDATLIHQSITGLYETRIDLSQLGGD

SEQ ID NO: 21 - protein, 1358 aa, Streptococcus pyogenes
MDKKYSIGLDIGTNSVGWAVITDDYKVPSKKFKVLGNTDRHSIKKNLIGALLFGSGETAEATRLKRTARRRYTRRKNRICYLQEIFSNEMAKVDDSFFHRLEESFLVEEDKKHERHPIFGNIVDEVAYHEKYPTIYHLRKKLADSTDKADLRLIYLALAHMIKFRGHFLIEGDLNPDNSDVDKLFIQLVQIYNQLFEENINASRVDAKAILSARLSKSRRLENLIAQLPGEKRNGLFGNLIALSLGLTPNFKSNFDLAEDAKLQLSKDTYDDDLDNLLAQIGDQYADLFLAAKNLSDAILLSDILRVNSEITKAPLSASMIKRYDEHHQDLTLLKALVRQQLPEKYKEIFFDQSKNGYAGYIDGGASQEEFYKFIKPILEKMDGTEELLVKLNREDLLRKQRTFDNGSIPHQIHLGELHAILRRQEDFYPFLKDNREKIEKILTFRIPYYVGPLARGNSRFAWMTRKSEETITPWNFEEVVDKGASAQSFIERMTNFDKNLPNEKVLPKHSLLYEYFTVYNELTKVKYVTEGMRKPAFLSGEQKKAIVDLLFKTNRKVTVKQLKEDYFKKIECFDSVEISGVEDRFNASLGAYHDLLKIIKDKDFLDNEENEDILEDIVLTLTLFEDRGMIEERLKTYAHLFDDKVMKQLKRRRYTGWGRLSRKLINGIRDKQSGKTILDFLKDGFANRNFMQLIHDDSLTFKEDIQKAQVSGQGHSLHEQIANLAGSPAIKKGILQTVKIVDELVKVMGHKPENIVIEMARENQTTQKGQKNSRERMKRIEEGIKELGSQILKEHPVENTQLQNEKLYLYYLQNGRDMYVDQELDINRLSDYDVDHIVPQSFIKDDSIDNKVLTRSDKNRGKSDNVPSEEVVKKMKNYWRQLLNAKLITQRKFDNLTKAERGGLSELDKAGFIKRQLVETRQITKHVAQILDSRMNTKYDENDKLIREVKVITLKSKLVSDFRKDFQFYKVREINNYHHAHDAYLNAVVGTALIKKYPKLESEFVYGDYKVYDVSEQEIGKATAKYFFYSNIMNFFKTEITLANGEIRKRPLIETNGETGEIVWDKGRDFATVRKVLSMPQVNIVKKTEVQTGGFSKESILPKRNSDKLIARKKDWDPKKYGGFDSPTVAYSVLVVAKVEKGKSKKLKSVKELLGITIMERSSFEKNPIDFLEAKGYKEVKKDLIIKLPKYSLFELENGRKRMLASGELQKGNELALPSKYVNFLYLASHYEKLKGSPEDNEQKQLFVEQHKHYLDEIIEQISEFSKRVILADANLDKVLSAYNKHRDKPIREQAENIIHLFTLTNLGAPAAFKYFDTTIDRKRYTSTKEVLDATLIHQSITGLYETRIDLSQLGGD

SEQ ID NO: 22 - protein, 1359 aa, Streptococcus pyogenes
MDKKYSIGLDIGTNSVGWAVITDDYKVPSKKFKVLGNTDRHSIKKNLIGALLFDSGETAEATRLKRTARRRYTRRKNRICYLQEIFSNEMAKVDDSFFHRLEESFLVEEDKKHERHPIFGNIVDEVAYHEKYPTIYHLRKKLVDSTDKADLRLIYLALAHMIKFRGHFLIEGDLNPDNSDVDKLFIQLVQTYNQLFEENINASGVDAKAILSARLSKSRRLENLIAQLPGEKKNGLFGNLIALSLGLTPNFKSNFDLAEDAKLQLSKDTYDDDLDNLLAQIGDQYADLFLAAKNLSDAILLSDILRLNSEITKAPLSASMIKRYDEHHQDLTLLKALVRQQLPEKYKEIFFDQSKNGYAGYIDGGASQEEFYKFIKPILEKMDGTEELLAKLNREDLLRKQRTFDNGSIPHQIHLGELHAILRRQEDFYPFLKDNREKIEKILTFRIPYYVGPLARGNSRFAWMTRKSEETITPWNFEEVVDKGASAQSFIERMTNFDKNLPNEKVLPKHSLLYEYFTVYNELTKVKYVTEGMRKPAFLSGEQKKAIVDLLFKTNRKVTVKQLKEDYFKKIECFDSVEISGVEDRFNASLGTYHDLLKIIKDKDFLDNEENEDILEDIVLTLTLFEDREMIEERLKTYAHLFDDKVMKQLKRRRYTGWGRLSRKLINGIRDKQSGKTILDFLKDGFANRNFMQLIHDDSLTFKEDIQKAQVSGQGDSLHEHIANLAGSPAIKKGILQTVKVVDELVKVMGRHKPENIVIEMARENQTTQKGQKNSRERMKRIEEGIKELGSQILKEHPVENTQLQNEKLYLYYLQNGRDMYVDQELDINRLSDYDVDHIVPQSFIKDDSIDNKVLTRSDKNRGKSDNVPSEEVVKKMKNYWRQLLNAKLITQRKFDNLTKAERGGLSELDKAGFIKRQLVETRQITKHVAQILDSRMNTKYDENDKLIREVKVITLKSKLVSDFRKDFQFYKVREINNYHHAHDAYLNAVVGTALIKKYPKLESEFVYGDYKVYDVSEQEIGKATAKYFFYSNIMNFFKTEITLANGEIRKRPLIETNGETGEIVWDKGRDFATVRKVLSMPQVNIVKKTEVQTGGFSKESILPKRNSDKLIARKKDWDPKKYGGFDSPTVAYSVLVVAKVEKGKSKKLKSVKELLGLTIMERSSFEKNPIDFLEAKGYKEVKKDLIIKLPKYSLFELENGRKRMLASGELQKGNELALPSKYVNFLYLASHYEKLKGSPEDNEQKQLFVEQHKHYLDEIIEQISEFSKRVILADANLDKVLSAYNKHRDKPIREQAENIIHLFTLTNLGAPAAFKYFDTTIDRKRYTSTKEVLDATLIHQSITGLYETRIDLSQLGGD

SEQ ID NO: 23 - protein, 1358 aa, Streptococcus pyogenes
MDKKYSIGLDIGTNSVGWAVITDDYKVPSKKLKVLGNTDRHGIKKNLIGALLFDSGETAEATRLKRTARRRYTRRKNRICYLQEIFSNEMAKVDDSFFHRLEESFLVEEDKKHERHPIFGNIVDEVAYHEKYPTIYHLRKKLADSTDKVDLRLIYLALAHMIKFRGHFLIEGDLNPDNSDVDKLFIQLVQTYNQLFEENINASRVDAKAILSARLSKSRRLENLIAQLPGEKKNGLFGNLIALSLGLTPNFKSNFDLAEDAKLQLSKDTYDDDLDNLLAQIGDQYADLFLAAKNLSDAILLSDILRVNSEITKAPLSASMIKRYDEHHQDLTLLKALVRQQLPEKYKEIFFDQSKNGYAGYIDGGASQEEFYKFIKPILEKMDGTEELLAKLNREDLLRKQRTFDNGSIPYQIHLGELHAILRRQEDFYPFLKDNREKIEKILTFRIPYYVGPLARGNSRFAWMTRKSEETITPWNFEEVVDKGASAQSFIERMTNFDKNLPNEKVLPKHSLLYEYFTVYNELTKVKYVTEGMRKPAFLSGEQKKAIVDLLFKTNRKVTVKQLKEDYFKKIECFDSVEISGVEDRFNTSLGTYHDLLKIIKDKDFLDNEENEDILEDIVLTLTLFEDKEMIEERLKKYANLFDDKVMKQLKRRHYTGWGRLSRKLINGIRDKQSGKTILDFLKDGFANRNFMQLINDDSLTFKEAIQKAQVSGQGHSLHEQIANLAGSPAIKKGILQTVKIVDELVKVMGHKPENIVIEMARENQTTQKGQKNSRERMKRIEEGIKELGSQILKEHPVENTQLQNEKLYLYYLQNGRDMYVDQELDINRLSDYDVDHIVPQSFLKDDSIDNKVLTRSDKNRGKSDNVPSEEVVKKMKNYWRQLLNAKLITQRKFDNLTKAERGGLSELDKAGFIKRQLVETRQITKHVAQILDSRMNTKYDENDKLIREVKVITLKSKLVSDFRKDFQFYKVREINNYHHAHDAYLNAVVGTALIKKYPKLESEFVYGDYKVYDVSEQEIGKATAKYFFYSNIMNFFKTEITLANGEIRKRPLIETNGETGEIVWDKGRDFATVRKVLSMPQVNIVKKTEVQTGGFSKESILPKRNSDKLIARKKDWDPKKYGGFDSPTVAYSVLVVAKVEKGKSKKLKSVKELLGITIMERSSFEKNPIDFLEAKGYKEVRKDLIIKLPKYSLFELENGRKRMLASGELQKGNELALPSKYVNFLYLASHYEKLKGSPEDNEQKQLFVEQHKHYLDEIIEQISEFSKRVILADANLDKVLSAYNKHRDKPIREQAKNIIHLFTLTNLGAPAAFKYFDTTIERNRYKSIKEVLDATLIHQSITGLYETRIDLSQLGGD

SEQ ID NO: 24 - protein, 1358 aa, Streptococcus pyogenes
MDKKYSIGLDIGTNSVGWAVITDDYKVPSKKLKVLGNTDRHGIKKNLIGALLFDSGETAEATRLKRTARRRYTRRKNRICYLQEIFSNEMAKVDDSFFHRLEESFLVEEDKKHERHPIFGNIVDEVAYHEKYPTIYHLRKKLADSTDKVDLRLIYLALAHMIKFRGHFLIEGDLNPDNSDVDKLFIQLVQTYNQLFEENINASRVDAKAILSARLSKSRRLENLIAQLPGEKKNGLFGNLIALSLGLTPNFKSNFDLAEDAKLQLSKDTYDDDLDNLLAQIGDQYADLFLAAKNLSDAILLSDILRVNSEITKAPLSASMIKRYDEHHQDLTLLKALVRQQLPEKYKEIFFDQSKNGYAGYIDGGASQEEFYKFIKPILEKMDGTEELLAKLNREDLLRKQRTFDNGSIPYQIHLGELHAILRRQEDFYPFLKDNREKIEKILTFRIPYYVGPLARGNSRFAWMTRKSEETITPWNFEEVVDKGASAQSFIERMTNFDKNLPNEKVLPKHSLLYEYFTVYNELTKVKYVTEGMRKPAFLSGEQKKAIVDLLFKTNRKVTVKQLKEDYFKKIECFDSVEISGVEDRFNTSLGTYHDLLKIIKDKDFLDNEENEDILEDIVLTLTLFEDKEMIEERLKKYANLFDDKVMKQLKRRHYTGWGRLSRKLINGIRDKQSGKTILDFLKDGFANRNFMQLINDDSLTFKEAIQKAQVSGQGHSLHEQIANLAGSPAIKKGILQTVKIVDELVKVMGHKPENIVIEMARENQTTQKGQKNSRERMKRIEEGIKELGSQILKEHPVENTQLQNEKLYLYYLQNGRDMYVDQELDINRLSDYDVDHIVPQSFLKDDSIDNKVLTRSDKNRGKSDNVPSEEVVKKMKNYWRQLLNAKLITQRKFDNLTKAERGGLSELDKAGFIKRQLVETRQITKHVAQILDSRMNTKYDENDKLIREVKVITLKSKLVSDFRKDFQFYKVREINNYHHAHDAYLNAVVGTALIKKYPKLESEFVYGDYKVYDVSEQEIGKATAKYFFYSNIMNFFKTEITLANGEIRKRPLIETNGETGEIVWDKGRDFATVRKVLSMPQVNIVKKTEVQTGGFSKESILPKRNSDKLIARKKDWDPKKYGGFDSPTVAYSVLVVAKVEKGKSKKLKSVKELLGITIMERSSFEKNPIDFLEAKGYKEVRKDLIIKLPKYSLFELENGRKRMLASGELQKGNELALPSKYVNFLYLASHYEKLKGSPEDNEQKQLFVEQHKHYLDEIIEQISEFSKRVILADANLDKVLSAYNKHRDKPIREQAKNIIHLFTLTNLGAPAAFKYFDTTIERNRYKSIKEVLDATLIHQSITGLYEIRIDLSQLGGD

SEQ ID NO: 25 - protein, 1359 aa, Streptococcus pyogenes
MDKKYSIGLDIGTNSVGWAVITDDYKVPSKKFKVLGNTDRHSIKKNLIGALLFDSGETAEATRLKRTARRRYTRRKNRICYLQEIFSNEMAKVDDSFFHRLEESFLVEEDKKHERHPIFGNIVDEVAYHEKYPTIYHLRKKLVDSTDKADLRLIYLALAHMIKFRGHFLIEGDLNPDNSDVDKLFIQLVQTYNQLFEENINASGVDAKAILSARLSKSRRLENLIAQLPGEKKNGLFGNLIALSLGLTPNFKSNFDLAEDAKLQLSKDTYDDDLDNLLAQIGDQYADLFLAAKNLSDAILLSDILRVNTEITKASLSASMIKRYDEHHQDLTLLKALVRQQLPEKYKEIFFDQSKNGYAGYIDGGASQEEFYKFIKPILEKMDGTEELLVKLNREDLLRKQRTFDNGSIPHQIHLGELHAILRRQEDFYPFLKDNREKIEKILTFRIPYYVGPLARGNSRFAWMTRKSEETITPWNFEEVVDKGASAQSFIERMTNFDKNLPNEKVLPKHSLLYEYFTVYNELTKVKYVTEGMRKPAFLSGEQKKAIVDLLFKTNRKVTVKQLKEDYFKKIECFDSVEISGVEDRFNASLGTYHDLLKIIKDKDFLDNEENEDILEDIVLTLTLFEDREMIEERLKTYAHLFDDKVMKQLKRRRYTGWGRLSRKLINGIRDKQSGKTILDFLKDGFANRNFMQLIHDDSLTFKEDLQKAQVSGQGDSLHEHIANLAGSPAIKKGILQTVKVVDELVKVMGRHKPENIVIEMARENQTTQKGQKNSRERMKRIEEGIKELGSDILKEYPVENTQLQNEKLYLYYLQNGRDMYVDQELDINRLSDYDVDHIVPQSFIKDDSIDNKVLTRSDKNRGKSDNVPSEEVVKKMKNYWRQLLNAKLITQRKFDNLTKAERGGLSELDKAGFIKRQLVETRQITKHVAQILDSRMNTKYDENDKLIREVKVITLKSKLVSDFRKDFQFYKVREINNYHHAHDAYLNAVVGTALIKKYPKLESEFVYGDYKVYDVSEQEIGKATAKYFFYSNIMNFFKTEITLANGEIRKRPLIETNGETGEIVWDKGRDFATVRKVLSMPQVNIVKKTEVQTGGFSKESILPKRNSDKLIARKKDWDPKKYGGFDSPTVAYSVLVVAKVEKGKSKKLKSVKELLGITIMERSSFEKNPIDFLEAKGYKEVRKDLIIKLPKYSLFELENGRKRMLASGELQKGNELALPSKYVNFLYLASHYEKLKGSPEDNEQKQLFVEQHKHYLDEIIEQISEFSKRVILADANLDKVLSAYNKHRDKPIREQAENIIHLFTLTNLGAPAAFKYFDTTIGRNRYKSIKEVLDATLIHQSITGLYETRIDLSQLGGD

SEQ ID NO: 26 - protein, 1359 aa, Streptococcus pyogenes
MDKKYSIGLDIGTNSVGWAVITDDYKVPSKKFKVLGNTDRHGIKKNLIGALLFDSGETAEATRLKRTARRRYTRRKNRICYLQEIFSNEMAKVDDSFFHRLEESFLVEEDKKHERHPIFGNIVDEVAYHEKYPTIYHLRKKLADSTDKVDLRLIYLALAHMIKFRGHFLIEGDLNPDNSDVDKLFIQLVQTYNQLFEENINASRVDAKAILSARLSKSRRLENLIAQLPGEKKNGLFGNLIALSLGLTPNFKSNFDLAEDAKLQLSKDTYDDDLDNLLAQIGDQYADLFLAAKNLSDATLLSDILRVNSEITKAPLSASMIKRYDEHHQDLTLLKALVRQQLPEKYKEIFFDQSKNGYAGYIDGGASQEEFYKFIKPILEKMDGTEELLAKLNREDLLRKQRTFDNGSIPYQIHLGELHAILRRQEDFYPFLKDNREKIEKILTFRIPYYVGPLARGNSRFAWMTRKSEETITPWNFEEVVDKGASAQSFIERMTNFDKNLPNEKVLPKHSLLYEYFTVYNELTKVKYVTEGMRKPAFLSGEQKKAIVDLLFKTNRKVTVKQLKEDYFKKIECFDSVEISGVEDRFNASLGTYHDLLKIIKDKDFLDNEENEDILEDIVLTLTLFEDREMIEERLKTYAHLFDDKVMKQLKRRRYTGWGRLSRKLINGIRDKQSGKTILDFLKDGFANRNFMQLIHDDSLTFKEDIQKAQVSGQGDSLHEHIANLAGSPAIKKGILQTVKVVDELVKVMGRHKPENIVIEMARENQTTQKGQKNSRERMKRIEEGIKELGSDILKEYPVENTQLQNEKLYLYYLQNGRDMYVDQELDINRLSDYDVDHIVPQSFLKDDSIDNKVLTRSDKNRGKSDNVPSEEVVKKMKNYWRQLLNAKLITQRKFDNLTKAERGGLSELDKAGFIKRQLVETRQITKHVAQILDSRMNTKYDENDKLIREVKVITLKSKLVSDFRKDFQFYKVREINNYHHAHDAYLNAVVGTALIKKYPKLESEFVYGDYKVYDVSEQEIGKATAKYFFYSNIMNFFKTEITLANGEIRKRPLIETNGETGEIVWDKGRDFATVRKVLSMPQVNIVKKTEVQTGGFSKESILPKRNSDKLIARKKDWDPKKYGGFDSPTVAYSVLVVAKVEKGKSKKLKSVKELLGITIMERSSFEKNPIDFLEAKGYKEVRKDLIIKLPKYSLFELENGRKRMLASGELQKGNELALPSKYVNFLYLASHYEKLKGSPEDNEQKQLFVEQHKHYLDEIIEQISEFSKRVILADANLDKVLSAYNKHRDKPIREQAENIIHLFTLTNLGAPAAFKYFDTTIDRKRYTSTKEVLDATLIHQSITGLYETRIDLSQLGGD

SEQ ID NO: 27 - protein, 1359 aa, Streptococcus pyogenes
MDKKYSIGLDIGTNSVGWAVITDDYKVPSKKFKVLGNTDRHSIKKNLIGALLFDSGETAEATRLKRTARRRYTRRKNRICYLQEIFSNEMAKVDDSFFHRLEESFLVEEDKKHERHPIFGNIVDEVAYHEKYPTIYHLRKKLADSTDKADLRLIYLALAHMIKFRGHFLIEGDLNPDNSDVDKLFIQLVQTYNQLFEENINASRVDAKAILSARLSKSRRLENLIAQLPGEKRNGLFGNLIALSLGLTPNFKSNFDLAEDAKLQLSKDTYDDDLDNLLAQIGDQYADLFLAAKNLSDAILLSDILRVNSEITKAPLSASMIKRYDEHHQDLTLLKALVRQQLPEKYKEIFFDQSKNGYAGYIDGGASQEEFYKFIKPILEKMDGTEELLAKLNREDLLRKQRTFDNGSIPHQIHLGELHAILRRQEDFYPFLKDNREKIEKILTFRIPYYVGPLARGNSRFAWMTRKSEETITPWNFEEVVDKGASAQSFIERMTNFDKNLPNEKVLPKHSLLYEYFTVYNELTKVKYVTEGMRKPEFLSGEQKKAIVDLLFKTNRKVTVKQLKEDYFKKIECFDSVEISGVEDRFNASLGTYHDLLKIIKDKDFLDNEENEDILEDIVLTLTLFEDREMIEERLKTYAHLFDDKVMKQLKRRRYTGWGRLSRKLINGIRDKQSGKTILDFLKDGFANRNFMQLIHDDSLTFKEDIQKAQVSGQGDSLHEHIANLAGSPAIKKGILQTVKVVDELVKVMGRHKPENIVIEMARENQTTQKGQKNSRERMKRIEEGIKELGSDILKEYPVENTQLQNEKLYLYYLQNGRDMYVDQELDINRLSDYDVDHIVPQSFIKDDSIDNKVLTRSDKNRGKSDNVPSEEVVKKMKNYWKQLLNAKLITQRKFDNLTKAERGGLSELDKAGFIKRQLVETRQITKHVAQILDSRMNTKYDENDKLIREVKVITLKSKLVSDFRKDFQFYKVREINNYHHAHDAYLNAVVGTALIKKYPKLESEFVYGDYKVYDVSEQEIGKATAKYFFYSNIMNFFKTEITLANGEIRKRPLIETNGETGEIVWDKGRDFATVRKVLSMPQVNIVKKTEVQTGGFSKESILPKRNSDKLIARKKDWDPKKYGGFDSPTVAYSVLVVAKVEKGKSKKLKSVKELLGITIMERSSFEKNPIDFLEAKGYKEVRKDLIIKLPKYSLFELENGRKRMLASGELQKGNELALPSKYVNFLYLASHYEKLKGSPEDNEQKQLFVEQHKHYLDEIIEQISEFSKRVILADANLDKVLSAYNKHRDKPIREQAENIIHLFTLTNFGAPAAFIYFDTTIGRNRYKSIKEVLDATLIHQSITGLYETRIDLSQLGGD

SEQ ID NO: 28 - protein, 1359 aa, Streptococcus pyogenes
MDKKYSIGLDIGTNSVGWAVITDDYKVPSKKFKVLGNTDRHSIKKNLIGALLFDSGETAEATRLKRTARRRYTRRKNRICYLQEIFSNEIAKVDDSFFHRLEESFLVEEDKKHERHPIFGNIVDEVAYHEKYPTIYHLRKKLADSTDKADLRLIYLALAHMIKFRGHFLIEGDLNPDNSDVDKLFIQLVQTYNQLFEENINASRVDAKAILSARLSKSRRLENLIAQLPGEKRNGLFGNLIALSLGLTPNFKSNFDLAEDAKLQLSKDTYDDDLDNLLAQIGDQYADLFLAAKNLSDAILLSDILRVNTEITKAPLSASMIKRYDEHHQDLTLLKALVRQQLPEKYKEIFFDQSKNGYAGYIDGGASQEEFYKFIKPILEKMDGTEELLAKLNREDLLRKQRTFDNGSIPHQIHLGELHAILRRQEDFYPFLKDNREKIEKILTFRIPYYVGPLARGNSRFAWMTRKSEETITPWNFEEVVDKGASAQSFIERMTNFDKNLPNEKVLPKHSLLYEYFTVYNELTKVKYVTEGMRKPAFLSGEQKKAIVDLLFKTNRKVTVKQLKEDYFKKIECFDSVEISGVEDRFNASLGTYHDLLKIIKDKDFLDNEENEDILEDIVLTLTLFEDREMIEERLKTYAHLFDDKVMKQLKRRRYTGWGRLSRKLINGIRDKQSGKTILDFLKDGFANRNFMQLIHDDSLTFKEDLQKAQVSGQGDSLHEHIANLAGSPAIKKGILQTVKVVDELVKVMGRHKPENIVIEMARENQTTQKGQKNSRERMKRIEEGIKELGSDILKEYPVENTQLQNEKLYLYYLQNGRDMYVDQELDINRLSDYDVDHIVPQSFLKDDSIDNKVLTRSDKNRGKSDNVPSEEVVKKMKNYWKQLLNAKLITQRKFDNLTKAERGGLSELDKAGFIKRQLVETRQITKHVAQILDSRMNTKYDENDKLIREVRVITLKSKLVSDFRKDFQFYKVREINNYHHAHDAYLNAVVGTALIKKYPKLESEFVYGDYKVYDISEQEIGKATAKYFFYSNIMNFFKTEITLANGEIRKRPLIETNGETGEIVWDKGRDFATVRKVLSMPQVNIVKKTEVQTGGFSKESILPKRNSDKLIARKKDWDPKKYGGFDSPTVAYSVLVVAKVEKGKSKKLKSVKELVGITIMERSSFEKDPVDFLEAKGYKEVRKDLIIKLPKYSLFELENGRKRMLASGELQKGNELALPSKYVNFLYLASHYEKLKGSPEDNEQKQLFVEQHKHYLDEIIEQISEFSKRVILADANLDKVLSAYNKHRDKPIREQAENIIHLFTLTNLGAPAAFKYFDTTIGRNRYKSIKEVLDATLIHQSITGLYETRIDLSQLGGD

SEQ ID NO: 29 - protein, 1359 aa, Streptococcus pyogenes
MDKKYSIGLDIGTNSVGWAVITDDYKVPSKKFKVLGNTDRHSIKKNLIGALLFDSGETAEATRLKRTARRRYTRRKNRICYLQEIFSNEIAKVDDSFFHRLEESFLVEEDKKHERHPIFGNIVDEVAYHEKYPTIYHLRKKLADSTDKADLRLIYLALAHMIKFRGHFLIEGGLNPDNSDVDKLFIQLVQTYNQLFEENINASRVDAKAILSARLSKSRRLENLIAQLPGEKRNGLFGNLIALSLGLTPNFKSNFDLAEDAKLQLSKDTYDDDLDNLLAQIGDQYADLFLAAKNLSDAILLSDILRVNTEITKAPLSASMIKRYDEHHQDLTLLKALVRQQLPEKYKEIFFDQSKNGYAGYIDGGASQEEFYKFIKPILEKMDGTEELLAKLNREDLLRKQRTFDNGSIPHQIHLGELHAILRRQEDFYPFLKDNREKIEKILTFRIPYYVGPLARGNSRFAWMTRKSEETITPWNFEEVVDKGASAQSFIERMTNFDKNLPNEKVLPKHSLLYEYFTVYNELTKVKYVTEGMRKPAFLSGEQKKAIVDLLFKTNRKVTVKQLKEDYFKKIECFDSVEISGVEDRFNASLGTYHDLLKIIKDKDFLDNEENEDILEDIVLTLTLFEDREMIEERLKTYAHLFDDKVMKQLKRRRYTGWGRLSRKLINGIRDKQSGKTILDFLKDGFANRNFMQLIHDDSLTFKEDLQKAQVSGQGDSLHEHIANLAGSPAIKKGILQTVKVVDELVKVMGRHKPENIVIEMARENQTTQKGQKNSRERMKRIEEGIKELGSDILKEYPVENTQLQNEKLYLYYLQNGRDMYVDQELDINRLSDYDVDHIVPQSFLKDDSIDNKVLTRSDKNRGKSDNVPSEEVVKKMKNYWKQLLNAKLITQRKFDNLTKAERGGLSELDKAGFIKRQLVETRQITKHVAQILDSRMNTKYDENDKLIREVRVITLKSKLVSDFRKDFQFYKVREINNYHHAHDAYLNAVVGTALIKKYPKLESEFVYGDYKVYDISEQEIGKATAKYFFYSNIMNFFKTEITLANGEIRKRPLIETNGETGEIVWDKGRDFATVRKVLSMPQVNIVKKTEVQTGGFSKESILPKRNSDKLIARKKDWDPKKYGGFDSPTVAYSVLVVAKVEKGKSKKLKSVKELVGITIMERSSFEKDPVDFLEAKGYKEVRKDLIIKLPKYSLFELENGRKRMLASGELQKGNELALPSKYVNFLYLASHYEKLKGSPEDNEQKQLFVEQHKHYLDEIIEQISEFSKRVILADANLDKVLSAYNKHRDKPIREQAENIIHLFTLTNLGAPAAFKYFDTTIGRNRYKSIKEVLDATLIHQSITGLYETRIDLSQLGGD

SEQ ID NO: 30 - protein, 1359 aa, Streptococcus pyogenes
MDKKYSIGLDIGTNSVGWAVITDDYKVPSKKFKVLGNTDRHSIKKNLIGALLFDSGETAEATRLKRTARRRYTRRKNRICYLQEIFSNEMAKVDDSFFHRLEESFLVEEDKKHERHPIFGNIVDEVAYHEKYPTIYHLRKKLVDSTDKADLRLIYLALAHMIKFRGHFLIEGDLNPDNSDVDKLFIQLVQTYNQLFEENINANGVDAKAILSARLSKSRRLENLIAQLPGEKKNGLFGNLIALSLGLTPNFKSNFDLAEDAKLQLSKDTYDDDLDNLLAQIGDQYADLFLAAKNLSDAILLSDILRVNTEITKAPLSASMIKRYDEHHQDLTLLKALVRQQLPEKYKEIFFDQSKNGYAGYIDGGASQEEFYKFIKPILEKMDGTEELLVKLNREDLLRKQRTFDNGSIPHQIHLGELHAILRRQEDFYPFLKDNREKIEKILTFRIPYYVGPLARGNSRFAWMTRKSEETITPWNFEEVVDKGASAQSFIERMTNFDKNLPNEKVLPKHSLLYEYFTVYNELTKVKYVTEGMRKPAFLSGEQKKAIVDLLFKTNRKVTVKQLKEDYFKKIECFDSVEISGVEDRFNASLGTYHDLLKIIKDKDFLDNEENEDILEDIVLTLTLFEDREMIEERLKTYAHLFDDKVMKQLKRRRYTGWGRLSRKLINGIRDKQSGKTILDFLKDGFANRNFMQLIHDDSLTFKEDIQKAQVSGQGDSLHEHIANLAGSPAIKKGILQTVKVVDELVKVMGRHKPENIVIEMARENQTTQKGQKNSRERMKRIEEGIKELGSQILKEHPVENTQLQNEKLYLYYLQNGRDMYVDQELDINRLSDYDVDHIVPQSFLKDDSIDNKVLTRSDKNRGKSDNVPSEEVVKKMKNYWRQLLNAKLITQRKFDNLTKAERGGLSELDKAGFIKRQLVETRQITKHVAQILDSRMNTKYDENDKLIREVKVITLKSKLVSDFRKDFQFYKVREINNYHHAHDAYLNAVVGTALIKKYPKLESEFVYGDYKVYDVSEQEIGKATAKYFFYSNIMNFFKTEITLANGEIRKRPLIETNGETGEIVWDKGRDFATVRKVLSMPQVNIVKKTEVQTGGFSKESILPKRNSDKLIARKKDWDPKKYGGFDSPTVAYSVLVVAKVEKGKSKKLKSVKELLGITIMERSSFEKNPIDFLEAKGYKEVKKDLIIKLPKYSLFELENGRKRMLASGELQKGNELALPSKYVNFLYLASHYEKLKGSPEDNEQKQLFVEQHKHYLDEIIEQISEFSKRVILADANLDKVLSAYNKHRDKPIREQAENIIHLFTLTNLGAPAAFKYFDTTIDRKRYTSTKEVLDATLIHQSITGLYETRIDLSQLGGD

SEQ ID NO: 31 - protein, 1359 aa, Streptococcus pyogenes
MDKKYSIGLDIGTNSVGWAVITDDYKVPSKKFKVLGNTDRHSIKKNLIGALLFDSGETAEATRLKRTARRRYTRRKNRICYLQEIFSNEMAKVDDSFFHRLEESFLVEEDKKHERHPIFGNIVDEVAYHEKYPTIYHLRKKLADSTDKADLRLIYLALAHMIKFRGHFLIEGDLNPDNSDVDKLFIQLVQTYNQLFEENINASRVDAKAILSARLSKSRRLENLIAQLPGEKKNGLFGNLIALLLGLTPNFKSNFDLAEDAKLQLSKDTYDDDLDNLLAQIGDQYADLFLAAKNLSDAILLSDILRVNSEITKAPLSASMIKRYDEHHQDLTLLKALVRQQLPEKYKEIFFDQSKNGYAGYIDGGASQEEFYKFIKPILEKMDGTEELLAKLNREDLLRKQRTFDNGSIPHQIHLGELHAILRRQEDFYPFLKDNREKIEKILTFRIPYYVGPLARGNSRFAWMTRKSEETITPWNFEEVVDKGASAQSFIERMTNFDKNLPNEKVLPKHSLLYEYFTVYNELTKVKYVTEGMRKPAFLSGEQKKAIVDLLFKTNRKVTVKQLKEDYFKKIECFDSVEISGVEDRFNASLGTYHDLLKIIKDKDFLDNEENEDILEDIVLTLTLFEDKEMIEERLKKYAHLFDDKVMKQLKRRRYTGWGRLSRKLINGIRDKQSGKTILDFLKDGFANRNFMQLIHDDSLTFKEDIQKAQVSGQGDSLHEHIANLAGSPAIKKGILQTVKVVDELVKVMGRHKPENIVIEMARENQTTQKGQKNSRERMKRIEEGIKELGSDILKEYPVENTQLQNEKLYLYYLQNGRDMYVDQELDINRLSDYDVDHIVPQSFLKDDSIDNKVLTRSDKNRGKSDNVPSEEVVKKMKNYWKQLLNAKLITQRKFDNLTKAERGGLSELDKAGFIKRQLVETRQITKHVAQILDSRMNTKYDENDKLIREVRVITLKSKLVSDFRKDFQFYKVREINNYHHAHDAYLNAVVGTALIKKYPKLESEFVYGDYKVYDVSEQEIGKATAKYFFYSNIMNFFKTEITLANGEIRKRPLIETNGETGEIVWDKGRDFATVRKVLSMPQVNIVKKTEVQTGGFSKESILPKRNSDKLIARKKDWDPKKYGGFDSPTVAYSVLVVAKVEKGKSKKLKSVKELLGITIMERSSFEKNPIDFLEAKGYKEVRKDLIIKLPKYSLFELENGRKRMLASGELQKGNELALPSKYVNFLYLASHYEKLKGSPEDNEQKQLFVEQHKHYLDEIIEQISEFSKRVILADANLDKVLSAYNKHRDKPIREQAENIIHLFTLTNLGAPAAFKYFDTTIDRKRYTSTKEVLDATLIHQSITGLYETRIDLSQLGGD

SEQ ID NO: 32 - protein, 1359 aa, Streptococcus pyogenes
MDKKYSIGLDIGTNSVGWAVITDDYKVPSKKFKVLGNTDRHSIKKNLIGALLFDSGEIAEATRLKRTARRRYTRRKNRICYLQEIFSNEMAKVDDSFFHRLEESFLVEEDKKHERHPIFGNIVDEVAYHEKYPTIYHLRKKLVDSTDKADLRLIYLALAHMIKFRGHFLIEGDLNPDNSDVDKLFIQLVQTYNQLFEENINASGVDAKAILSARLSKSRRLENLIAQLPGEKKNGLFGNLIALSLGLTPNFKSNFDLAEDAKLQLSKDTYDDDLDNLLAQIGDQYADLFLAAKNLSDAILLSDILRLNSEITKAPLSASMIKRYDEHHQDLTLLKALVRQQLPEKYKEIFFDQSKNGYAGYIDGGASQEEFYKFIKPILEKMDGTEELLAKLNRKDLLRKQRTFDNGSIPHQIHLGELHAILRRQEDFYPFLKDNREKIEKILTFRIPYYVGPLARGNSRFAWMTRKSEETITPWNFEEVVDKGASAQSFIERMTNFDKNLPNEKVLPKHSLLYEYFTVYNELTKVKYVTEGMRKPAFLSGEQKKAIVDLLFKTNRKVTVKQLKEDYFKKIECFDSVEISGVEDRFNASLGTYHDLLKIIKDKDFLDNEENEDILEDIVLTLTLFEDREMIEERLKTYAHLFDDKVMKQLKRRRYTGWGRLSRKLINGIRDKQSGKTILDFLKDGFANRNFMQLIHDDSLTFKEDIQKAQVSGQGDSLHEHIANLAGSPAIKKGILQTVKVVDELVKVMGRHKPENIVIEMARENQTTQKGQKNSRERMKRIEEGIKELGSQILKEHPVENTQLQNEKLYLYYLQNGRDMYVDQELDINRLSDYDVDHIVPQSFIKDDSIDNKVLTRSDKNRGKSDNVPSEEVVKKMKNYWRQLLNAKLITQRKFDNLTKAERGGLSELDKAGFIKRQLVETRQITKHVAQILDSRMNTKYDENDKLIREVKVITLKSKLVSDFRKDFQFYKVREINNYHHAHDAYLNAVVGTALIKKYPKLESEFVYGDYKVYDVSEQEIGKATAKYFFYSNIMNFFKTEITLANGEIRKRPLIETNGETGEIVWDKGRDFATVRKVLSMPQVNIVKKTEVQTGGFSKESILPKRNSDKLIARKKDWDPKKYGGFDSPTVAYSVLVVAKVEKGKSKKLKSVKELLGITIMERSSFEKNPIDFLEAKGYKEVRKDLIIKLPKYSLFELENGRKRMLASGELQKGNELALPSKYVNFLYLASHYEKLKGSPEDNEQKQLFVEQHKHYLDEIIEQISEFSKRVILADANLDKVLSAYNKHRDKPIREQAENIIHLFTLTNLGAPTAFKYFDTTIDRKRYTSTKEVLDATFIHQSITGLYETRIDLSQLGGD

SEQ ID NO: 33 - protein, 1184 aa, Streptococcus pyogenes
PDNSDVDKLFIQLVQTYNQLFEENINASGVDAKAILSARLSKSRRLENLIAQLPGEKKNGLFGNLIALSLGLTPNFKSNFDLAEDAKLQLSKDTYDDDLDNLLAQIGDQYADLFLAAKNLSDAILLSDILRVNTEITKAPLSASMIKRYDEHHQDLTLLKALVRQQLPEKYKEIFFDQSKNGYAGYIDGGASQEEFYKFIKPILEKMDGTEELLVKLNREDLLRKQRTFDNGSIPHQIHLGELHAILRRQEDFYPFLKDNREKIEKILTFRIPYYVGPLARGNSRFAWMTRKSEETITPWNFEEVVDKGASAQSFIERMTNFDKNLPNEKVLPKHSLLYEYFTVYNELTKVKYVTEGMRKPAFLSGEQKKAIVDLLFKTNRKVTVKQLKEDYFKKIECFDSVEISGVEDRFNASLGTYHDLLKIIKDKDFLDNEENEDILEDIVLTLTLFEDREMIEERLKTYAHLFDDKVMKQLKRRRYTGWGRLSRKLINGIRDKQSGKTILDFLKDGFANRNFMQLIHDDSLTFKEDIQKAQVSGQGDSLHEHIANLAGSPAIKKGILQTVKVVDELVKVMGRHKPENIVIEMARENQTTQKGQKNSRERMKRIEEGIKELGSQILKEHPVENTQLQNEKLYLYYLQNGRDMYVDQELDINRLSDYDVDHIVPQSFLKDDSIDNKVLTRSDKNRGKSDNVPSEEVVKKMKNYWRQLLNAKLITQRKFDNLTKAERGGLSELDKAGFIKRQLVETRQITKHVAQILDSRMNTKYDENDKLIREVKVITLKSKLVSDFRKDFQFYKVREINNYHHAHDAYLNAVVGTALIKKYPKLESEFVYGDYKVYDVSEQEIGKATAKYFFYSNIMNFFKTEITLANGEIRKRPLIETNGETGEIVWDKGRDFATVRKVLSMPQVNIVKKTEVQTGGFSKESILPKRNSDKLIARKKDWDPKKYGGFDSPTVAYSVLVVAKVEKGKSKKLKSVKELLGITIMERSSFEKNPIDFLEAKGYKEVKKDLIIKLPKYSLFELENGRKRMLASGELQKGNELALPSKYVNFLYLASHYEKLKGSPEDNEQKQLFVEQHKHYLDEIIEQISEFSKRVILADANLDKVLSAYNKHRDKPIREQAENIIHLFTLTNLGAPAAFKYFDTTIDRKRYTSTKEVLDATLIHQSITGLYETRIDLSQLGGD

SEQ ID NO: 34 - protein, 1359 aa, Streptococcus pyogenes
MDKKYSIGLDIGTNSVGWAVITDDYKVPSKKFKVLGNTDRHSIKKNLIGALLFDSGETAEATRLKRTARRRYTRRKNRICYLQEIFSNEMAKVDDSFFHRLEESFLVEEDKKHERHPIFGNIVDEVAYHEKYPTIYHLRKKLADSTDKADLRLIYLALAHMIKFRGHFLIEGDLNPDNSDVDKLFIQLVQTYNQLFEENINASRVDAKAILSARLSKSRRLENLIAQLPGEKKNGLFGNLIALSLGLTPNFKSNFDLAEDAKLQLSKDTYDDDLDNLLAQIGDQYADLFLAAKNLSDATLLSDILRVNSEITKAPLSASMIKRYDEHHQDLTLLKALVRQQLPEKYKEIFFDQSKNGYAGYIDGGASQEEFYKFIKPILEKMDGTEELLAKLNREDLLRKQRTFDNGSIPHQIHLGELHAILRRQEDFYPFLKDNREKIEKILTFRIPYYVGPLARGNSRFAWMTRKSEETITPWNFEEVVDKGASAQSFIERMTNFDKNLPNEKVLPKHSLLYEYFTVYNELTKVKYVTEGMRKPAFLSGEQKKAIVDLLFKTNRKVTVKQLKEDYFKKIECFDSVEISGVEDRFNASLGTYHDLLKIIKDKDFLDNEENEDILEDIVLTLTLFEDREMIEERLKTYAHLFDDKVMKQLKRRRYTGWGRLSRKLINGIRDKQSGKTILDFLKDGFANRNFMQLIHDDSLTFKEDIQKAQVSGQGDSLHEHIANLAGSPAIKKGILQTVKVVDELVKVMGRHKPENIVIEMARENQTTQKGQKNSRERMKRIEEGIKELGSDILKEYPVENTQLQNEKLYLYYLQNGRDMYVDQELDINRLSDYDVDHIVPQSFLKDDSIDNKVLTRSDKNRGKSDNVPSEEVVKKMKNYWRQLLNAKLITQRKFDNLTKAERGGLSELDKAGFIKRQLVETRQITKHVAQILDSRMNTKYDENDKLIREVKVITLKSKLVSDFRKDFQFYKVREINNYHHAHDAYLNAVVGTALIKKYPKLESEFVYGDYKVYDVSEQEIGKATAKYFFYSNIMNFFKTEITLANGEIRKRPLIETNGETGEIVWDKGRDFATVRKVLSMPQVNIVKKTEVQTGGFSKESILPKRNSDKLIARKKDWDPKKYGGFDSPTVAYSVLVVAKVEKGKSKKLKSVKELLGITIMERSSFEKNPIDFLEAKGYKEVRKDLIIKLPKYSLFELENGRKRMLASGELQKGNELALPSKYVNFLYLASHYEKLKGSPEDNEQKQLFVEQHKHYLDEIIEQISEFSKRVILADANLDKVLSAYNKHRDKPIREQAENIIHLFTLTNLGAPAAFKYFDTTIDRKRYTSTKEVLDATLIHQSITGLYETRIDLSQLGGD

SEQ ID NO: 35 - protein, 1358 aa, Streptococcus pyogenes
MDKKYSIGLDIGTNSVGWAVITDDYKVPSKKFKVLGNTDRHSIKKNLIGALLFDSGETAEATRLKRTARRRYTRRKNRICYLQEIFSNEMAKVDDSFFHRLEESFLVEEDKKHERHPIFGNIVDEVAYHEKYPTIYHLRKKLADSTDKVDLRLIYLALAHMIKFRGHFLIEGDLNPDNSDVDKLFIQLVQTYNQLFEENINASRVDAKAILSARLSKSRRLENLIAQLPGEKKNGLFGNLIALSLGLTPNFKSNFDLAEDTKLQLSKDTYDDDLDNLLAQIGDQYADLFLAAKNLSDAILLSDILRVNSEITKAPLSASMIKRYDEHHQDLTLLKALVRQQLPEKYKEIFFDQSKNGYAGYIDGGASQEEFYKFIKPILEKMDGTEELLAKLNREDLLRKQRTFDNGSIPYQIHLGELHAILRRQEDFYPFLKDNREKIEKILTFRIPYYVGPLARGNSRFAWMTRKSEETITPWNFEEVVDKGASAQSFIERMTNFDKNLPNEKVLPKHSLLYEYFTVYNELTKVKYVTEGMRKPAFLSGEQKKAIVDLLFKTNRKVTVKQLKEDYFKKIECFDSVEISGVEDRFNTSLGTYHDLLKIIKDKDFLDNEENEDILEDIVLTLTLFEDKEMIEERLKKYANLFDDKVMKQLKRRHYTGWGRLSRKLINGIRDKQSGKTILDFLKDGFANRNFMQLINDDSLTFKEAIQKAQVSGQGHSLHEQIANLAGSPAIKKGILQTVKIVDELVKVMGHKPENIVIEMARENQTTQKGQKNSRERMKRIEEGIKELGSQILKEHPVENTQLQNEKLYLYYLQNGRDMYVDQELDINRLSDYDVDHIVPQSFLKDDSIDNKVLTRSDKNRGKSDNVPSEEVVKKMKNYWRQLLNAKLITQRKFDNLTKAERGGLSELDKAGFIKRQLVETRQITKHVAQILDSRMNTKYDENDKLIREVKVITLKSKLVSDFRKDFQFYKVREINNYHHAHDAYLNAVVGTALIKKYPKLESEFVYGDYKVYDVSEQEIGKATAKYFFYSNIMNFFKTEITLANGEIRKRPLIETNGETGEIVWDKGRDFATVRKVLSMPQVNIVKKTEVQTGGFSKESILPKRNSDKLIARKKDWDPKKYGGFDSPTVAYSVLVVAKVEKGKSKKLKSVKELLGITIMERSSFEKNPIDFLEAKGYKEVRKDLIIKLPKYSLFELENGRKRMLASGELQKGNELALPSKYVNFLYLASHYEKLKGSPEDNEQKQLFVEQHKHYLDEIIEQISEFSKRVILADANLDKVLSAYNKHRDKPIREQAKNIIHLFTLTNLGAPAAFKYFDTTIERNRYKSIKEVLDATLIHQSITGLYETRIDLSQLGGD

SEQ ID NO: 36 - protein, 1359 aa, Streptococcus pyogenes
MDKKYSIGLDIGTNSVGWAVITDDYKVPSKKFKVLGNTDRHSIKKNLIGALLFDSGETAEATRLKRTARRRYTRRKNRICYLQEIFSNEMAKVDDSFFHRLEESFLVEEDKKHERHPIFGNIVDEVAYHEKYPTIYHLRKKLADSTDKADLRLIYLALAHMIKFRGHFLIEGDLNPDNSDVDKLFIQLVQTYNQLFEENINASRVDAKAILSARLSKSRRLENLIAQLPGEKRNGLFGNLIALSLGLTPNFKSNFDLAEDAKLQLSKDTYDDDLDNLLAQIGDQYADLFLAAKNLSDAILLSDILRVNSEITKAPLSASMIKRYDEHHQDLTLLKALVRQQLPEKYKEIFFDQSKNGYAGYIDGGASQEEFYKFIKPILEKMDGTEELLAKLNREDLLRKQRTFDNGSIPHQIHLGELHAILRRQEDFYPFLKDNREKIEKILTFRIPYYVGPLARGNSRFAWMTRKSEETITPWNFEEVVDKGASAQSFIERMTNFDKNLPNEKVLPKHSLLYEYFTVYNELTKVKYVTEGMRKPAFLSGEQKKAIVDLLFKTNRKVTVKQLKEDYFKKIECFDSVEISGVEDRFNASLGTYHDLLKIIKDKDFLDNEENEDILEDIVLTLTLFEDREMIEERLKTYAHLFDDKVMKQLKRRRYTGWGRLSRKLINGIRDKQSGKTILDFLKDGFANRNFMQLIHDDSLTFKEDIQKAQVSGQGDSLHEHIANLAGSPAIKKGILQTVKIVDELVKVMGRHKPENIVIEMARENQTTQKGQKNSRERMKRIEEGIKELGSDILKEYPVENTQLQNEKLYLYYLQNGRDMYVDQELDINRLSDYDVDHIVPQSFLKDDSIDNKVLTRSDKNRGKSDNVPSEEVVKKMKNYWKQLLNAKLITQRKFDNLTKAERGGLSELDKAGFIKRQLVETRQITKHVAQILDSRMNTKYDENDKLIREVKVITLKSKLVSDFRKDFQFYKVREINNYHHAHDAYLNAVVGTALIKKYPKLESEFVYGDYKVYDVSEQEIGKATAKYFFYSNIMNFFKTEITLANGEIRKRPLIETNGETGEIVWDKGRDFATVRKVLSMPQVNIVKKTEVQTGGFSKESILPKRNSDKLIARKKDWDPKKYGGFDSPTVAYSVLVVAKVEKGKSKKLKSVKELLGITIMERSSFEKNPIDFLEAKGYKEVRKDLIIKLPKYSLFELENGRKRMLASGELQKGNELALPSKYVNFLYLASHYEKLKGSPEDNEQKQLFVEQHKHYLDEIIEQISEFSKRVILADANLDKVLSAYNKHRDKPIREQAENIIHLFTLTNLGAPAAFKYFDTTIGRNRYKSIKEVLDATLIHQSITGLYETRIDLSQLGGD

SEQ ID NO: 37 - protein, 1270 aa, Streptococcus pyogenes
MAKVDDSFFHRLEESFLVEEDKKHERHPIFGNIVDEVAYHEKYPTIYHLRKKLVDSTDKADLRLIYLALAHMIKFRGHFLIEGDLNPDNSDVDKLFIQLVQTYNQLFEENINASGVDAKAILSARLSKSRRLENLIAQLPGEKKNGLFGNLIALSLGLTPNFKSNFDLAEDAKLQLSKDTYDDDLDNLLAQIGDQYADLFLAAKNLSDAILLSDILRVNTEITKAPLSASMIKRYDEHHQDLTLLKALVRQQLPEKYKEIFFDQSKNGYAGYIDGGASQEEFYKFIKPILEKMDGTEELLVKLNREDLLRKQRTFDNGSIPHQIHLGELHAILRRQEDFYPFLKDNREKIEKILTFRIPYYVGPLARGNSRFAWMTRKSEETITPWNFEEVVDKGASAQSFIERMTNFDKNLPNEKVLPKHSLLYEYFTVYNELTKVKYVTEGMRKPAFLSGEQKKAIVDLLFKTNRKVTVKQLKEDYFKKIECFDSVEISGVEDRFNASLGTYHDLLKIIKDKDFLDNEENEDILEDIVLTLTLFEDREMIEERLKTYAHLFDDKVMKQLKRRRYTGWGRLSRKLINGIRDKQSGKTILDFLKDGFANRNFMQLIHDDSLTFKEDIQKAQVSGQGDSLHEHIANLAGSPAIKKGILQTVKVVDELVKVMGRHKPENIVIEMARENQTTQKGQKNSRERMKRIEEGIKELGSQILKEHPVENTQLQNEKLYLYYLQNGRDMYVDQELDINRLSDYDVDHIVPQSFLKDDSIDNKVLTRSDKNRGKSDNVPSEEVVKKMKNYWRQLLNAKLITQRKFDNLTKAERGGLSELDKAGFIKRQLVETRQITKHVAQILDSRMNTKYDENDKLIREVKVITLKSKLVSDFRKDFQFYKVREINNYHHAHDAYLNAVVGTALIKKYPKLESEFVYGDYKVYDVSEQEIGKATAKYFFYSNIMNFFKTEITLANGEIRKRPLIETNGETGEIVWDKGRDFATVRKVLSMPQVNIVKKTEVQTGGFSKESILPKRNSDKLIARKKDWDPKKYGGFDSPTVAYSVLVVAKVEKGKSKKLKSVKELLGITIMERSSFEKNPIDFLEAKGYKEVKKDLIIKLPKYSLFELENGRKRMLASGELQKGNELALPSKYVNFLYLASHYEKLKGSPEDNEQKQLFVEQHKHYLDEIIEQISEFSKRVILADANLDKVLSAYNKHRDKPIREQAENIIHLFTLTNLGAPAAFKYFDTTIDRKRYTSTKEVLDATLIHQSITGLYETRIDLSQLGGD

SEQ ID NO: 38 - protein, 536 aa, Streptococcus pyogenes
  source 1..536: note = MGAS2111
QELDINRLSGYDVDHIVPQSFLKDDSIDNKVLTRSDKNRGKSDNVPSEEVVKKMKNYWRQLLNAKLITQRKFDNLTKAERGGLSELDKVGFIKRQLVETRQITKHVAQILDSRMNTKYDENDKLIREVRVITLKSKLVSDFRKDFQFYKVREINNYHHAHDAYLNAVVGTALIKKYPKLESEFVYGDYKVYDVSEQEIGKATAKYFFYSNIMNFFKTEITLANGEIRKRPLIETNGETGEIVWDKGRDFATVRKVLSMPQVNIVKKTEVQTGGFSKESILPKRNSDKLIARKKDWDPKKYGGFDSPTVAYSVLVVAKVEKGKSKKLKSVKELLGITIMERSSFEKDPIDFLEAKGYKEVRKDLIIKLPKYSLFELENGRKRMLASGELQKGNELALPSKYVNFLYLASHYEKLKGSPEDNEQKQLFVEQHKHYLDEIIEQISEFSKRVILADANLDKVLSAYNKHRDKPIREQAENIIHLFTLTNLGAPAAFKYFDTTIDRKRYTSTKEVLDATLIHQSITGLYETRIDLSQLGGD

SEQ ID NO: 39 - protein, 305 aa, Streptococcus pyogenes
  source 1..305: note = SS1447
IETNGETGEIVWDKGRDFATVRKVLSMPQVNIVKKTEVQTGGFSKESILPKRNSDKLIARKKDWDPKKYGGFDSPTVAYSVLVVAKVEKGKSKKLKSVKELLGITIMERSSFEKDPIDFLEAKGYKEVRKDLIIKLPKYSLFELENGRKRMLASGELQKGNELALPSKYVNFLYLASHYEKLKGSPEDNEQKQLFVEQHKHYLDEIIEQISEFSKRVILADANLDKVLSAYNKHRDKPIREQAENIIHLFTLTNLGAPAAFKYFDTTIDRKRYTSTKEVLDATLIHQSITGLYETRIDLSQLGGD

SEQ ID NO: 40 - protein, 1359 aa, synthetic construct
  REGION 1..1359: note = Synthetic polypeptide
MDKKYSIGLDIGTNSVGWAVITDDYKVPSKKFKVLGNTDRHSIKKNLIGALLFDSGEIAEATRLKRTARRRYTRRKNRICYLQEIFSNEMAKVDDSFFHRLEESFLVEEDKKHERHPIFGNIVDEVAYHEKYPTIYHLRKKLVDSTDKADLRLIYLALAHMIKFRGHFLIEGDLNPDNSDVDKLFIQLVQTYNQLFEENINASGVDAKAILSARLSKSRRLENLIAQLPGEKKNGLFGNLIALSLGLTPNFKSNFDLAEDAKLQLSKDTYDDDLDNLLAQIGDQYADLFLAAKNLSDAILLSDILRLNSEITKAPLSASMIKRYDEHHQDLTLLKALVRQQLPEKYKEIFFDQSKNGYAGYIDGGASQEEFYKFIKPILEKMDGTEELLAKLNREDLLRKQRTFDNGSIPHQIHLGELHAILRRQEDFYPFLKDNREKIEKILTFRIPYYVGPLARGNSRFAWMTRKSEETITPWNFEEVVDKGASAQSFIERMTNFDKNLPNEKVLPKHSLLYEYFTVYNELTKVKYVTEGMRKPAFLSGEQKKAIVDLLFKTNRKVTVKQLKEDYFKKIECFDSVEISGVEDRFNASLGTYHDLLKIIKDKDFLDNEENEDILEDIVLTLTLFEDREMIEERLKTYAHLFDDKVMKQLKRRRYTGWGRLSRKLINGIRDKQSGKTILDFLKDGFANRNFMQLIHDDSLTFKEDIQKAQVSGQGDSLHEHIANLAGSPAIKKGILQTVKVVDELVKVMGRHKPENIVIEMARENQTTQKGQKNSRERMKRIEEGIKELGSQILKEHPVENTQLQNEKLYLYYLQNGRDMYVDQELDINRLSDYDVDHIVPQSFIKDDSIDNKVLTRSDKNRGKSDNVPSEEVVKKMKNYWRQLLNAKLITQRKFDNLTKAERGGLSELDKAGFIKRQLVETRQITKHVAQILDSRMNTKYDENDKLIREVKVITLKSKLVSDFRKDFQFYKVREINNYHHAHDAYLNAVVGTALIKKYPKLESEFVYGDYKVYDVSEQEIGKATAKYFFYSNIMNFFKTEITLANGEIRKRPLIETNGETGEIVWDKGRDFATVRKVLSMPQVNIVKKTEVQTGGFSKESILPKRNSDKLIARKKDWDPKKYGGFDSPTVAYSVLVVAKVEKGKSKKLKSVKELLGITIMERSSFEKNPIDFLEAKGYKEVRKDLIIKLPKYSLFELENGRKRMLASGELQKGNELALPSKYVNFLYLASHYEKLKGSPEDNEQKQLFVEQHKHYLDEIIEQISEFSKRVILADANLDKVLSAYNKHRDKPIREQAENIIHLFTLTNLGAPTAFKYFDTTIDRKRYTSTKEVLDATFIHQSITGLYETRIDLSQLGGD

SEQ ID NO: 41 - protein, 1341 aa, synthetic construct
  REGION 1..1341: note = Synthetic polypeptide
MDQKYSIGLDIGTNSVGWAVVTDDYKVPAKKMKVLGNTDKQSIKKNLLGALLFDSGETAEATRLKRTARRRYTRRRNRLRYLQEIFAEEMNKVDENFFQRLDDSFLVDEDKRGERHPIFGNIAAEVKYHDDFPTIYHLRKHLADISQKADLRLVYLALAHMIKFRGHFLIEGQLKAENTNVQALFKDFVEVYDKTVEESHLSEMTVDALSILTEKVSKSRRLENLIAHYPAEKKNTLFGNLIALSLGLQPNFKTNFQLSEDAKLQFSKDTYEEDLEGLLGEIGDEYADLFASAKNLYDAILLSGILTVDDNSTKAPLSASMVKRYEEHQKDLKKLKDFIKVNAPDQYNAIFKDKNKKGYAGYIENGVKQDEFYKYLKGILLQINGSGDFLDKIDREDFLRKQRTFDNGSIPHQIHLQEMHAILRRQEEHYPFLKENQDKIEKILTFRIPYYVGPLARKGSRFAWAEYKADEKITPWNFDDILDKEKSAEKFITRMTLNDLYLPEEKVLPKHSLLYETFTVYNELTKVKYVNEQGEAKFFDANMKQEIFDHVFKENRKVTKDKLLNYLNKEFEEFRIVNLTGLDKENKAFNSSLGTYHDLRKILDKSFLDDKANEKTIEDIIQTLTLFEDREMIRQRLQKYSDIFTKAQLKKLERRHYTGWGRLSYKLINGIRNKENKKTILDYLIDDGYANRNFMQLINDDALSFKEEIARAQIIGDVDDIANVVHDLPGSPAIKKGILQSVKIVDELVKVMGHNPANIIIEMARENQMTDKGRRNSQQRLKLLQDSLKPVNIKNVENQQLQNDRLFLYYIQNGKDMYTGETLDINNLSQYDIDHIIPQAFIKDNSLDNRVLTRSDKNRGKSDDVPSIEVVHEMKSFWSKLLSVKLITQRKFDNLTKAERGGLTEEDKAGFIKRQLVETRQITKHVAQILDERFNTEFDGNKRRIRNVKIITLKSNLVSNFRKEFELYKVREINDYHHAHDAYLNAVVGNALLLKYPQLEPEFVYGEYPKYNSYRSRKSATEKFLFYSNILRFFKKEDIQTNEDGEIAWNKEKHIKILRKVLSYPQVNIVKKTEEQTGGFSKESILPKGESDKLIPRKTKNSYWNPKKYGGFDSPVVAYSILVFADVEKGKSKKLRKVQDMVGITIMEKKRFEKHPVDFLEQRGYRNVRLEKIIKLPKYSLFELENKRRRLLASARELQKGNELVIPQRFTTLLYHSYQIEKNYEPEHREYVEKHKDEFKELLEYISVFSRKYVLADNNLTKIEMLFSKNKDAEVSSLAKSFISLLTFTAFGAPAAFNFFGENIDRKRYTSVTECLNATLIHQSITGLYETRIDLSKLGED

SEQ ID NO: 42 - protein, 1356 aa, synthetic construct
  REGION 1..1356: note = Synthetic polypeptide
MTKKNYSIGLDIGTNSVGWAVITDDYKVPAKKMKVLGNTDKKYIKKNLLGALLFDSGETAEATRLKRTARRRYTRRKNRLRYLQEIFAEEMTKVDESFFQRLDESFLRWDDDNKKLGRYPIFGNKADVVKYHQEFPTIYHLRKHLADSSEKADLRLVYLALAHMIKFRGHFLIEGELNAENTDVQKIFADFVGVYDRTFDDSHLSEITVDAASILTEKISKSRRLENLIKYYPTEKKNTLFGNLIALALGLQPNFKMNFKLSEDAKLQFSKDSYEEDLGELLGKIGDDYADLFTSAKNLYDAILLSGILIVDDNSTKAPLSASMIKRYVEHQEDLEKLKEFIKANKSELYHDIFKDKNKNGYAGYIENGVKQDEFYKYLKNTLSKIAGSDYFLDKIEREDFLRKQRTFDNGSIPHQIHLQEMHAILRRQGDYYPFLKENQDRIEKILTFRIPYYVGPLARKDSRFSWAEYHSDEKITPWNFDKVIDKEKSAEKFITRMTLNDLYLPEEKVLPKHSHVYETYAVYNELTKIKYVNEQGKDSFFDSNMKQEIFDHVFKENRKVTKEKLLNYLNKEFPEYRIKDLIGLDKENKSFNASLGTYHDLKKILDKAFLDDKVNEEVIEDIIKTLTLFEDKDMIHERLQKYSDIFTADQLKKLERRHYTGWGRLSYKLINGIRNKENNKTILDYLIDDGSANRNFMQLINDDTLPFKQIIQKSQVVGDVDDIEAVVHDLPGSPAIKKGILQSVKIVDELVKVMGDNPDNIVIEMARENQTTNRGRSQSQQRLKKLQNSLKPSYIEDKVENSHLQNDQLFLYYIQNGKDMYTGDELDIDHLSDYDIDHIIPQAFIKDDSIDNRVLTSSAKNRGKSDDVPSLDIVRARKAEWVRLYKSGLISKRKFDNLTKAERGGLTEADKAGFIKRQLVETRQITKHVAQILDARFNTESDENDKVIRDVKVITLKSNLVSQFRKDFEFYKVREINDYHHAHDAYLNAVVGTALLKKYPKLASEFVYGEYKKYDISSDKATAKYFFYSNLMNFFKRVIRYSNGKVIVRPVVEYSKDTEDIAWDKKSNFRTICKVLSYPQVNIVKKVETQTGGFSKESILPKGDSDKLIPRKTKKAYWDTKKYGGFDSPTVAYSVFVVADVEKGKAKKLKTVKELVGISIMERSFFEENPVEFLENKGYHNIREDKLIKLPKYSLFEFEGGKRRLLASASELQKGNEMVIPGHLVKLLYHAQRINSFNSTKYLDYVSAHKKEFEKVLSCVEDFANLYVDVEKNLSKIRAVADSMDNFSIEEISNSFINLLTLTALGAPADFNFLGEKIPRKRYTSTKECLNATLIHQSITGLYETRIDLSKIGEE

SEQ ID NO: 43 - protein, 1365 aa, Streptococcus agalactiae
MNKPYSIGLDIGTNSVGWSIITDDYKVPAKKIRVLGNTDKEYIKKNLIGALLFDGGNTAADRRLKRTARRRYTRRRNRILYLQEIFAEEMSKVDDSFFHRLEDSFLVEEDKRGSKYPIFATLQEEKYYHEKFPTIYHLRKELADKKEKADLRLVYLALAHIIKFRGHFLIEDDRFDVRNTDIQKQYQAFLEIFDTTFENNDLLSQDVDVEAILTDKISKSAKKDRILAQYPNQKSTGIFAEFLKLIVGNQADFKKHFNLEDKTPLQFAKDSYDEDLENLLGQIGDEFADLFSAAKKLYDSVLLSGILTVTDLSTKAPLSASMIQRYDEHREDLKQLKQFVKASLPEKYQEIVADSSKDGYAGYIEGKTNQEAFYKYLSKLLTKQEGSEYFLEKIKNEDFLRKQRTFDNGSIPHQVHLTELRAIIRRQSEYYPFLKENLDRIEKILTFRIPYYVGPLAREKSDFAWMTRKTDDSIRPWNFEDLVDKEKSAEAFIHRMTNNDLYLPEEKVLPKHSLIYEKFTVYNELTKVRFLAEGFKDFQFLNRKQKETIFNSLFKEKRKVTEKDIISFLNKVDGYEGIAIKGIEKQFNASLSTYHDLKKILGKDFLDNTDNELILEDIVQTLTLFEDREMIKKRLDIYKDFFTESQLKKLYRRHYTGWGRLSAKLINGIRNKENQKTILDYLIDDGSANRNFMQLIKDAGLSFKPIIDKARTGSHSDNLKEVIGELAGSPAIKKGILQSLKIVDELVKVMGYEPEQIVVEMARENQTTAKGLSRSRQRLTTLRESLANLKSEKKPKYVKDQVENHHLSDDRLFLYYLQNGKDMYTDDELDIDNLSQYDIDHIIPQAFIKDDSIDNRVLVSSAKNRGKSDDVPSLEIVKDCKVFWKKLLDAKLMSQRKYDNLTKAERGGLTSDDKARFIQRQLVETRQITKHVARILDERFNNELDSKGRRIRKVKIVTLKSNLVSNFRKEFVFYKIREVNNYHHAHDAYLNAVVAKAILTKYPQLEPEFVYGDYPKYNSYKTRKATEKLFFYSNIMNFFKTKVTLADGTVVVKDDIEVNNDTGEIVWDKKKHFATVRKVLSYPQVNIVKKTEIQTGGFSKESILAHGNSDKLIPRKTKDIYLDPKKYGGFDSPIVAYSVLVVADIKKGKAQKLKTVTELLGITIMERSRFEKNPSAFLESKGYLNIRTDKLIILPKYSLFELENGRRRLLASAGELQKGNELALPTQFMKFLYLASRYNESKGKPEEIEKKQEFVNQHVSYFDDIFQIINDFSKRVILADANLEKINRLYQDNKENIPVDELANNIINLFTFTSLGAPAAFKFFDKIVDRKRYTSTKEVLNSTLIHQSITGLYETRIDLGKLGED

SEQ ID NO: 44 - protein, 1365 aa, Streptococcus agalactiae
MNKPYSIGLDIGTNSVGWSIITDDYKVPAKKMRVLGNTDKEYIKKNLIGALLFDGGNTAADRRLKRTARRRYTRRRNRILYLQEIFAEEMSKVDDSFFHRLEDSFLVEEDKRGSKYPIFATLQEEKDYHEKFPTIYHLRKELADKQEKADLRLIYLALAHIIKFRGHFLIEDDRFDVRNTDIQKQYQAFLEIFDTTFENNHLLSQNVDVEAILTDKISKSAKKDRILAQYPNQKSTGIFAEFLKLIVGNQADFKKHFNLEDKTPLQFAKDSYDEDLENLLGQIGDEFADLFSAAKKLYDSVLLSGILTVIDLSTKAPLSASMIQRYDEHREDLKQLKQFVKASLPEKYQEIFADSSKDGYAGYIEGKTNQEAFYKYLSKLLTKQEDSENFLEKIKNEDFLRKQRTFDNGSIPHQVHLTELKAIIRRQSEYYPFLKENQDRIEKILTFRIPYYIGPLAREKSDFAWMTRKTDDSIRPWNFEDLVDKEKSAEAFIHRMTNNDFYLPEEKVLPKHSLIYEKFTVYNELTKVRYKNEQGETYFFDSNIKQEIFDGVFKEHRKVSKKKLLDFLAKEYEEFRIVDVIGLDKENKAFNASLGTYHDLEKILDKDFLDNPDNESILEDIVQTLTLFEDREMIKKRLENYKDLFTESQLKKLYRRHYTGWGRLSAKLINGIRDKESQKTILDYLIDDGRSNRNFMQLINDDGLSFKSIISKAQAGSHSDNLKEVVGELAGSPAIKKGILQSLKIVDELVKVMGYEPEQIVVEMARENQTTNQGRRNSRQRYKLLDDGVKNLASNILKEYPTDNQALQNERLFLYYLQNGRDMYTGEALDIDNLSQYDIDHIIPQAFIKDDSIDNRVLVSSAKNRGKSDDVPSLEIVKDCKVFWKKLLDAKLMSQRKYDNLTKAERGGLTSDDKARFIQRQLVETRQITKHVARILDERFNNELDSKGRRIRKVKIVTLKSNLVSNFRKEFGFYKIREVNDYHHAHDAYLNAVVAKAILTKYPQLEPEFVYGLYRRKKLSKIVRATRKMFFYSNLMNMFKRVVRLADGSIVVRPVIETGRYMGKTAWDKKKHFATVRKVLSYPQVNIVKKTEIQTGGFSKESILAHGNSDKLIPRKTKDIYLDPKKYGGFDSPIVAYSVLVVADIKKGKAQKLKTVTELLGITIMERSKFEKNPSAFLESKGYLNIRDDKLMILPKYSLFELENGRRRLLASAGELQKGNELALPTQFMKFLYLASRYNESKGKPEEIEKKQEFVNQHVSYFDDILQLINDFSKRVILADANLEKINKLYQDNKENISVDELANNIINLFTFTSLGAPAAFKFFDKIVDRKRYTSTKEVLNSTLIHQSITGLYETRIDLSKLGED

SEQ ID NO: 45 - protein, 1365 aa, Streptococcus agalactiae
MNKPYSIGLDIGTNSVGWSIITDDYKVPAKKMRVLGNTDKEYIKKNLIGALLFDGGNTAADRRLKRTARRRYTRRRNRILYLQEIFAEEMSKVDDSFFHRLEDSFLVEEDKRGSKYPIFATLQEEKDYHEKFSTIYHLRKELADKKEKADLRLIYIALAHIIKFRGHFLIEDDSFDVRNTDISKQYQDFLEIFNITFENNDLLSQNVDVEAILTDKISKSAKKDRILAQYPNQKSTGIFAEFLKLIVGNQADFKKYFNLEDKTPLQFAKDSYDEDLENLLGQIGDEFADLFSAAKKLYDSVLLSGILTVIDLSTKAPLSASMIQRYDEHREDLKQLKQFVKASLPEKYQEIFADSSKDGYAGYIEGKTNQEAFYKYLSKLLTKQEDSENFLEKIKNEDFLRKQRTFDNGSIPHQVHLTELKAIIRRQSEYYPFLKENQDRIEKILTFRIPYYIGPLAREKSDFAWMTRKTDDSIRPWNFEDLVDKEKSAEAFIHRMTNNDFYLPEEKVLPKHSLIYEKFTVYNELTKVRYKNEQGETYFFDSNIKQEIFDGVFKEHRKVSKKKLLDFLAKEYEEFRIVDVIGLDKENKAFNASLGTYHDLEKILDKDFLDNPDNESILEDIVQTLTLFEDREMIKKRLENYKDLFTESQLKKLYRRHYTGWGRLSAKLINGIRDKESQKTILDYLIDDGRSNRNFMQLINDDGLSFKSIISKAQAGSHSDNLKEVVGELAGSPAIKKGILQSLKIVDELVKVMGYEPEQIVVEMARENQTTNQGRRNSRQRYKLLDDGVKNLASNILKEYPTDNQALQNERLFLYYLQNGRDMYTGEALDIDNLSQYDIDHIIPQAFIKDDSIDNRVLVSSAKNRGKSDDVPSLEIVKDCKVFWKKLLDAKLMSQRKYDNLTKAERGGLTSDDKARFIQRQLVETRQITKHVARILDERFNNELDSKGRRIRKVKIVTLKSNLVSNFRKEFGFYKIREVNNYHHAHDAYLNAVVAKAILTKYPQLEPEFVYGDYPKYNSYKTRKATEKLFFYSNIMNFFKTKVTLADGTVVVKDDIEVNNDTGEIVWDKKKHFATVRKVLSYPQNNIVKKTEIQTGGFSKESILAHGNSDKLIPRKTKDIYLDPKKYGGFDSPIVAYSVLVVADIKKGKAQKLKTVTELLGITIMERSRFEKNPSAFLESKGYLNIRADKLIILPKYSLFELENGRRRLLASAGELQKGNELALPTQFMKFLYLASRYNESKGKPEEIEKKQEFVNQHVSYFDDILQLINDFSKRVILADANLEKINKLYQDNKENISVDELANNIINLFTFTSLGAPAAFKFFDKIVDRKRYTSTKEVLNSTLIHQSITGLYETRIDLGKLGED

SEQ ID NO: 46 - protein, 1369 aa, Streptococcus agalactiae
MNKPYSIGLDIGTNSVGWSIITDDYKVPAKKMRVLGNTDKEYIKKNLIGALLFDGGNTAADRRLKRTARRRYTRRRNRILYLQEIFAEEMSKVDDSFFHRLEDSFLVEEDKRGSKYPIFATLQEEKDYHEKFSTIYHLRKELADKKEKADLRLIYIALAHIIKFRGHFLIEDDSFDVRNTDISKQYQDFLEIFNTIFENNDLLSQNVDVEAILTDKISKSAKKDRILAQYPNQKSTGIFAEFLKLIVGNQADFKKYFNLEDKTPLQFAKDSYDEDLENLLGQIGDEFADLFSAAKKLYDSVLLSGILTVIDLSTKAPLSASMIQRYDEHREDLKQLKQFVKASLPEKYQEIFADSSKDGYAGYIEGKTNQEAFYKYLSKLLTKQEDSENFLEKIKNEDFLRKQRTFDNGSIPHQVHLTELKAIIRRQSEYYPFLKENQDRIEKILTFRIPYYIGPLAREKSDFAWMTRKTDDSIRPWNFEDLVDKEKSAEAFIHRMTNNDFYLPEEKVLPKHSLIYEKFTVYNELTKVRYKNEQGETYFFDSNIKQEIFDGVFKEHRKVSKKKLLDFLAKEYEEFRIVDVIGLDKENKAFNASLGTYHDLEKILDKDFLDNPDNESILEDIVQTLTLFEDREMIKKRLENYKDLFTESQLKKLYRRHYTGWGRLSAKLINGIRDKESQKTILDYLIDDGRSNRNFMQLINDDGLSFKSIISKAQAGSHSDNLKEVVGELAGSPAIKKGILQSLKIVDELVKVMGYEPEQIVVEMARENQTTNQGRRNSRQRYKLLDDGVKNLASNILKEYPTDNQALQNERLFLYYLQNGRDMYTGEALDIDNLSQYDIDHIIPQAFIKDDSIDNRVLVSSAKNRGKSDDVPSLEIVKDCKVFWKKLLDAKLMSQRKYDNLTKAERGGLTSDDKARFIQRQLVETRQITKHVARILDERFNNELDSKGRRIRKVKIVTLKSNLVSNFRKEFGFYKIREVNNYHHAHDAYLNAVVAKAILTKYPQLEPEFVYGDYPKYNSYKTRKATEKLFFYSNIMNFFKTKVTLADGTVVVKDDIEVNNDTGEIVWDKKKHFATVRKVLSYPQNNIVKKTEIQTGGFSKESILAHGNSDKLIPRKTKDIYLDPKKYGGFDSPIVAYSVLVVADIKKGKAQKLKTVTELLGITIMERSRFEKNPSAFLESKGYLNIRADKLIILPKYSLFELENGRRRLLASAGETIDRLQKGNELALPTQFMKFLYLASRYNESKGKPEEIEKKQEFVNQHVSYFDDILQLINDFSKRVILADANLEKINKLYQDNKENISVDELANNIINLFTFTSLGAPAAFKFFDKIVDRKRYTSTKEVLNSTLIHQSITGLYETRIDLGKLGED

SEQ ID NO: 47 - protein, 1363 aa, Streptococcus agalactiae
MNKPYSIGLDIGTNSVGWSIITDDYKVPAKKMRVLGNTDKEYIKKNLIGALLFDGGNTAADRRLKRTARRRYTRRRNRILYLQEIFAEEMSKVDDSFFHRLEDSFLVEEDKRGSKYPIFATLQEEKDYHEKFSTIYHLRKELADKKEKADLRLIYIALAHIIKFRGHFLIEDDSFDVRNTDISKQYQDFLEIFNTTFENNDLLSQNVDVEAILTDKISKSAKKDRILAQYPNQKSTGIFAEFLKLIVGNQADFKKYFNLEDKTPLQFAKDSYDEDLENLLGQIGDEFADLFSAAKKLYDSVLLSGILTVIDLSTKAPLSASMIQRYDEHREDLKQLKQFVKASLPEKYQEIFADSSKDGYAGYIEGKTNQEAFYKYLSKLLTKQEDSENFLEKIKNEDFLRKQRTFDNGSIPHQVHLTELKAIIRRQSEYYPFLKENQDRIEKILTFRIPYYIGPLAREKSDFAWMTRKTDDSIRPWNFEDLVDKEKSAEAFIHRMTNNDFYLPEEKVLPKHSLIYEKFTVYNELTKVRYKNEQGETYFFDSNIKQEIFDGVFKEHRKVSKKKLLDFLAKEYEEFRIVDVIGLDKENKAFNASLGTYHDLEKILDKDFLDNPDNESILEDIIQTLTLFEDREMIKKRLENYKDLFTESQLKKLYRRHYTGWGRLSAKLINGIRDKESQKTILDYLIDDGRSNRNFMQLINDDGLSFKSIISKAQAGSHSDNLKEVVGELAGSPAIKKGILQSLKIVDELVKVMGYEPEQIVVEMARENQTTNQGRRNSRQRYKLLDDGVKNLASNILKEYPTDNQALQNERLFLYYLQNGRDMYTGEALDIDNLSQYDIDHIIPQAFIKDDSIDNRVLVSSAKNRGKSDDVPSLEIVKDCKVFWKKLLDAKLMSQRKYDNLTKAERGGLTSKARFIQRQLVETRQITKHVARILDERFNNELDSKGRRIRKVKIVTLKSNLVSNFRKEFGFYKIREVNNYHHAHDAYLNAVVAKAILTKYPQLEPEFVYGDYPKYNSYKTRKATEKLFFYSNIMNFFKTKVTLADGTVVVKDDIEVNNDTGEIVWDKKKHFATVRKVLSYPQNNIVKKTEIQTGGFSKESILAHGNSDKLIPRKTKDIYLDPKKYGGFDSPIVAYSVLVVADIKKGKAQKLKTVTELLGITIMERSRFEKNPSAFLESKGYLNIRADKLIILPKYSLFELENGRRRLLASAGELQKGNELALPTQFMKFLYLASRYNESKGKPEEIEKKQEFVNQHVSYFDDILQLINDFSKRVILADANLEKINKLYQDNKENISVDELANNIINLFTFTSLGAPAAFKFFDKIVDRKRYTSTKEVLNSTLIHQSITGLYETRIDLGKLGED

SEQ ID NO: 48 - protein, 1365 aa, Streptococcus agalactiae
MNKPYSIGLDIGTNSVGWSIITDDYKVPAKKMRVLGNTDKEYIKKNLIGALLFDGGNTAADRRLKRTARRRYTRRRNRILYLQEIFAEEMSKVDDSFFHRLEDSFLVEEDKRGSKYPIFATLQEEKDYHEKFSTIYHLRKELADKKEKADLRLIYIALAHIIKFRGHFLIEDDSFDVRNTDISKQYQDFLEIFNTTFENNDLLSQNVDVEAILTDKISKSAKKDRILAQYPNQKSTGIFAEFLKLIVGNQADFKKYFNLEDKTPLQFAKDSYDEDLENLLGQIGDEFADLFSAAKKLYDSVLLSGILTVIDLSTKAPLSASMIQRYDEHREDLKQLKQFVKASLPEKYQEIFADSSKDGYAGYIEGKTNQEAFYKYLSKLLTKQEDSENFLEKIKNEDFLRKQRTFDNGSIPHQVHLTELKAIIRRQSEYYPFLKENQDRIEKILTFRIPYYIGPLAREKSDFAWMTRKTDDSIRPWNFEDLVDKEKSAEAFIHRMTNNDFYLPEEKVLPKHSLIYEKFTVYNELTKVRYKNEQGETYFFDSNIKQEIFDGVFKEHRKVSKKKLLDFLAKEYEEFRIVDVIGLDKENKAFNASLGTYHDLEKILDKDFLDNPDNESILEDIVQTLTLFEDREMIKKRLENYKDLFTESQLKKLYRRHYTGWGRLSAKLINGIRDKESQKTILDYLIDDGRSNRNFMQLINDDGLSFKSIISKAQAGSHSDNLKEVVGELAGSPAIKKGILQSLKIVDELVKVMGYEPEQIVVEMARENQTTNQGRRNSRQRYKLLDDGVKNLASNILKEYPTDNQALQNERLFLYYLQNGRDMYTGEALDIDDLSQYDIDHIIPQAFIKDDSIDNRVLVSSAKNRGKSDDVPSLEIVKDCKVFWKKLLDAKLMSQRKYDNLTKAERGGLTSDDKARFIQRQLVETRQITKHVARILDERFNNELDSKGRRIRKVKIVTLKSNLVSNFRKEFGFYKIREVNNYHHAHDAYLNAVVAKAILTKYPQLEPEFVYGDYPKYNSYKTRKATEKLFFYSNIMNFFKTKVTLADGTVVVKDDIEVNNDTGEIVWDKKKHFATVRKVLSYPQNNIVKKTEIQTGGFSKESILAHGNSDKLIPRKTKDIYLDPKKYGGFDSPIVAYSVLVVADIKKGKAQKLKTVTELLGITIMERSRFEKNPSAFLESKGYLNIRADKLIILPKYSLFELENGRRRLLASAGELQKGNELALPTQFMKFLYLASRYNESKGKPEEIEKKQEFVNQHVSYFDDILQLINDFSKRVILADANLEKINKLYQDNKENISVDELANNIINLFTFTSLGAPAAFKFFDKIVDRKRYTSTKEVLNSTLIHQSITGLYETRIDLGKLGED

SEQ ID NO: 49 - protein, 1365 aa, Streptococcus agalactiae
MNKPYSIGLDIGTNSVGWSIITDDYKVPAKKMRVLGNTDKEYIKKNLIGALLFDGGNTAADRRLKRTARRRYTRRRNRILYLQEIFAEEMSKVDDSFFHRLEDSFLVEEDKRGSKYPIFATLQEEKDYHEKFSTIYHLRKELADKKEKADLRLIYIALAHIIKFRGHFLIEDDSFDVRNTDISKQYQDFLEIFNTTFENNDLLSQNVDVEAILTDKISKSAKKDRILAQYPNQKSTGIFAEFLKLIVGNQADFKKYFNLEDKTPLQFAKDSYDEDLENLLGQIGDEFADLFSAAKKLYDSVLLSGILTVIDLSTKAPLSASMIQRYDEHREDLKQLKQFVKASLPEKYQEIFADSSKDGYAGYIEGKTNQEAFYKYLSKLLTKQEDSENFLEKIKNEDFLRKQRTFDNGSIPHQVHLTELKAIIRRQSEYYPFLKENQDRIEKILTFRIPYYIGPLAREKSDFAWMTRKTDDSIRPWNFEDLVDKEKSAEAFIHRMTNNDFYLPEEKVLPKHSLIYEKFTVYNELTKVRYKNEQGETYFFDSNIKQEIFDGVFKEHRKVSKKKLLDFLAKEYEEFRIVDVIGLDKENKAFNASLGTYHDLEKILDKDFLDNPDNESILEDIVQTLTLFEDREMIKKRLENYKDLFTESQLKKLYRRHYTGWGRLSAKLINGIRDKESQKTILDYLIDDGRSNRNFMQLINDDGLSFKSIISKAQAGSHSDNLKEVVGELAGSPAIKKGILQSLKIVDELVKVMGYEPEQIVVEMARENQTTNQGRRNSRQRYKLLDDGVKNLASNILKEYPTDNQALQNERLFLYYLQNGRDMYTGEALDIDNLSQYDIDHIIPQAFIKDDSIDNRVLVSSAKNRGKSDDVPSLEIVKDCKVFWKKLLDAKLMSQRKYDNLTKAERGGLTSDDKARFIQRQLVETRQITKHVARILDERFNNELDSKGRRIRKVKIVTLKSNLVSNFRKEFGFYKIREVNNYHHAHDAYLNAVVAKAILTKYPQLEPEFVYGDYPKYNSYKTRKATEKLFFYSNIMNFFKTKVTLADGTVVVKDDIEVNNDTGEIVWDKKKHFATVRKVLSYPQNNIVKKTEIQTGGFSKESILAHGNSDKLIPRKTKDIYLDPKKYGGFDSPIVAYSVLVVADIKKGKAQKLKTVTELLGITIMERSRFEKNPSAFLESKGYLNIRADKLIILPKYSLFELENGRRRLLASAGELQKGNELALPTQFMKFLYLASRYNESKGKPEEIEKKQEFVNQHVSYFDDILQLINDFSKRVILADANLEKINKLYQDNKENISVDELANNIINLFTFTSLGAPAAFKFFDKIVDRKRYTSTKEVLNSTLIHQSITGLYETRIDLGKLGED

SEQ ID NO: 50 - protein, 1365 aa, Streptococcus agalactiae
MNKPYSIGLDIGTNSVGWSIITDDYKVPAKKMRVLGNTDKEYIKKNLIGALLFDGGNTAADRRLKRTARRRYTRRRNRILYLQEIFAEEMSKVDDSFFHRLEDSFLVEEDKRGSKYPIFATLQEEKDYHEKFSTIYHLRKELADKKEKADLRLIYIALAHIIKFRGHFLIEDDSFDVRNTDISKQYQDFLEIFNTTFENNDLLSQNVDVEAILTDKISKSAKKDRILAQYPNQKSTGIFAEFLKLIVGNQADFKKYFNLEDKTPLQFAKDSYDEDLENLLGQIGDEFADLFSAAKKLYDSVLLSGILTVIDLSTKAPLSASMIQRYDEHREDLKQLKQFVKASLPEKYQEIFADSSKDGYAGYIEGKTNQEAFYKYLSKLLTKQEDSENFLEKIKNEDFLRKQRTFDNGSIPHQVHLTELKAIIRRQSEYYPFLKENQDRIEKILTFRIPYYIGPLAREKSDFAWMTRKTDDSIRPWNFEDLVDKEKSAEAFIHRMTNNDFYLPEEKVLPKHSLIYEKFTVYNELTKVRYKNEQGETYFFDSNIKQEIFDGVFKEHRKVSKKKLLDFLAKEYEEFRIVDVIGLDKENKAFNASLGTYHDLEKILDKDFLDNPDNESILEDIVQTLTLFEDREMIKKRLENYKDLFTESQLKKLYRRHYTGWGRLSAKLINGIRDKESQKTILDYLIDDGRSNRNFMQLINDDGLSFKSIISKAQAGSHSDNLKEVVGELAGSPAIKKGILQSLKIVDELVKVMGYEPEQIVVEMARENQTTNQGRRNSRQRYKLLDDGVKNLASNILKEYPTDNQALQNERLFLYYLQNGRDMYTGEALDIDNLSQYDIDHIIPQAFIKDDSIDNRVLVSSAKNRGKSDDVPSLEIVKDCKVFWKKLLDAKLMSQRKYDNLTKAERGGLTSDDKARFIQRQLVETRQITKHVARILDERFNNELDSKGRRIRKVKIVTLKSNLVSNFRKEFGFYKIREVNNYHHAHDAYLNAVVAKAILTKYPQLEPEFVYGDYPKYNSYKTRKATEKLFFYSNIMNFFKTKVTLADGTVVVKDDIEVNNDTGEIVWDKKKHFATVRKVLSYPQNNIVKKTEIQTGGFSKESILAHGNSDKLIPRKTKDIYLDPKKYGGFDSPIVAYSVLVVADIKKGKAQKLKTVTELLGITIMERSRFEKNPSAFLESKGYLNIRADKLIILPKYSLFELENGRRRLLASAGELQKGNELALPTQFMKFLYLASRYNESKGKPEEIEKKQEFVNQHVSYFDDILQLINDFSKRVILADANLEKINKLYQDNKENISVDELANNIINLFTFTSLGAPAAFKFFDKIVDRKRYTSTKEVLNSTLIHQSITGLYETRIDLGKLGGD

SEQ ID NO: 51 - protein, 1365 aa, Streptococcus agalactiae
MNKPYSIGLDIGTNSVGWSIITDDYKVPAKKMRVLGNTDKEYIKKNLIGALLFDGGNTAADRRLKRTARRRYTRRRNRILYLQEIFAEEMSKVDDSFFHRLEDSFLVEEDKRGSKYPIFATLQEEKDYHEKFSTIYHLRKELADKKEKADLRLIYIALAHIIKFRGHFLIEDDSFDVRNTDISKQYQDFLEIFNTTFENNDLLSQNVDVEAILTDKISKSAKKDRILAQYPNQKSTGIFAEFLKLIVGNQADFKKYFNLEDKTPLQFAKDSYDEDLENLLGQIGDEFADLFSAAKKLYDSVLLSGILTVIDLSTKAPLSASMIQRYDEHREDLKQLKQFVKASLPEKYQEIFADSSKDGYAGYIEGKTNQEAFYKYLSKLLTKQEDSENFLEKIKNEDFLRKQRTFDNGSIPHQVHLTELKAIIRRQSEYYPFLKENQDRIEKILTFRIPYYIGPLAREKSDFAWMTRKTDDSIRPWNFEDLVDKEKSAEAFIHRMTNNDFYLPEEKVLPKHSLIYEKFTVYNELTKVRYKNEQGETYFFDSNIKQEIFDGVFKEHRKVSKKKLLDFLAKEYEEFRIVDVIGLDKENKAFNASLGTYHDLEKILDKDFLDNPDNESILEDIVQTLTLFEDREMIKKRLENYKDLFTESQLKKLYRRHYTGWGRLSAKLINGIRDKESQKTILDYLIDDGRSNRNFMQLINDDGLSFKSIISKAQAGSHSDNLKEVVGELAGSPAIKKGILQSLKIVDELVKVMGYEPEQIVVEMARENQTTNQGRRNSRQRYKLLDDGVKNLASNILKEYPTDNQALQNERLFLYYLQNGRDMYTGEALDIDNLSQYDIDHIIPQAFIKDDSIDNRVLVSSAKNRGKSDDVPSLEIVKDCKVFWKKLLDAKLMSQRKYDNLTKAERGGLTSDDKARFIQRQLVETRQITKHVARILDERFNNELDSKGRRIRKVKIVTLKSNLVSNFRKEFGFYKIREVNNYHHAHDAYLNAVVAKAILTKYPQLEPEFVYGDYPKYNSYKTRKATEKLFFYSNIMNFFKTKVTLADGTVVVKDDIEVNNDTGEIVWDKKKHFATVRKVLSYPQNNIVKKTEIQTGGFSKESILAHGNSDKLIPRKTKDIYLDPKKYGGFDSPIVAYSVLVVADIKKGKAQKLKTVTELLGITIMERSRFEKNPSAFLESKGYLNIRDDKLMILPKYSLFELENGRRRLLASAGELQKGNELALPTQFMKFLYLASRYNESKGKPEEIEKKQEFVNQHVSYFDDILQLINDFSKRVILADANLEKINKLYQDNKENISVDELANNIINLFTFTSLGAPAAFKFFDKIVDRKRYTSTKEVLNSTLIHQSITGLYETRIDLGKLGED

SEQ ID NO: 52 - protein, 1365 aa, Streptococcus agalactiae
MNKPYSIGLDIGTNSVGWSIITDDYKVPAKKMRVLGNTDKEYIKKNLIGALLFDGGNTAADRRLKRTARRRYTRRRNRILYLQEIFAEEMSKVDDSFFHRLEDSFLVEEDKRGSKYPIFATLQEEKDYHEKFSTIYHLRKELADKKEKADLRLIYIALAHIIKFRGHFLIEDDSFDVRNTDISKQYQDFLEIFNTTFENNDLLSQNVDVEAILTDKISKSAKKDRILAQYPNQKSTGIFAEFLKLIVGNQADFKKYFNLEDKTPLQFAKDSYDEDLENLLGQIGDEFADLFSAAKKLYDSVLLSGILTVIDLSTKAPLSASMIQRYDEHREDLKQLKQFVKASLPEKYQEIFADSSKDGYAGYIEGKTNQEAFYKYLSKLLTKQEDSENFLEKIKNEDFLRKQRTFDNGSIPHQVHLTELKAIIRRQSEYYPFLKENQDRIEKILTFRIPYYIGPLAREKSDFAWMTRKTDDSIRPWNFEDLVDKEKSAEAFIHRMTNNDFYLPEEKVLPKHSLIYEKFTVYNELTKVRYKNEQGETYFFDSNIKQEIFDGVFKEHRKVSKKKLLDFLAKEYEEFRIVDVIGLDKENKAFNASLGTYHDLEKILDKDFLDNPDNESILEDIVQTLTLFEDREMIKKRLENYKDLFTESQLKKLYRRHYTGWGRLSAKLINGIRDKESQKTILDYLIDDGRSNRNFMQLINDDGLSFKSIISKAQAGSHSDNLKEVVGELAGSPAIKKGILQSLKIVDELVKVVGYEPEQIVVEMARENQTTNQGRRNSRQRYKLLDDGVKNLASNILKEYPTDNQALQNERLFLYYLQNGRDMYTGEALDIDNLSQYDIDHIIPQAFIKDDSIDNRVLVSSAKNRGKSDDVPSLEIVKDCKVFWKKLLDAKLMSQRKYDNLTKAERGGLTSDDKARFIQRQLVETRQITKHVARILDERFNNELDSKGRRIRKVKIVTLKSNLVSNFRKEFGFYKIREVNNYHHAHDAYLNAVVAKAILTKYPQLEPEFVYGDYPKYNSYKTRKATEKLFFYSNIMNFFKTKVTLADGTVVVKDDIEVNNDTGEIVWDKKKHFATVRKVLSYPQNNIVKKTEIQTGGFSKESILAHGNSDKLIPRKTKDIYLDPKKYGGFDSPIVAYSVLVVADIKKGKAQKLKTVTELLGITIMERSRFEKNPSAFLESKGYLNIRADKLIILPKYSLFELENGRRRLLASAGELQKGNELALPTQFMKFLYLASRYNESKGKPEEIEKKQEFVNQHVSYFDDILQLINDFSKRVILADANLEKINKLYQDNKENISVDELANNIINLFTFTSLGAPAAFKFFDKIVDRKRYTSTKEVLNSTLIHQSITGLYETRIDLGKLGED

SEQ ID NO: 53 - protein, 1365 aa, Streptococcus agalactiae
MNKPYSIGLDIGTNSVGWSIITDDYKVPAKKMRVLGNTDKEYIKKNLIGALLFDGGNTAADRRLKRTARRRYTRRRNRILYLQEIFAEEMSKVDDSFFHRLEDSFLVEEDKRGSKYPIFATLQEEKDYHEKFSTIYHLRKELADKKEKADLRLIYIALAHIIKFRGHFLIEDDSFDVRNTDISKQYQDFLEIFNTTFENNDLLSQNVDVEAILTDKISKSAKKDRILAQYPNQKSTGIFAEFLKLIVGNQADFKKYFNLEDKTPLQFAKDSYDEDLENLLRQIGDEFADLFSAAKKLYDSVLLSGILTVIDLSTKAPLSASMIQRYDEHREDLKQLKQFVKASLPEKYQEIFADSSKDGYAGYIEGKTNQEAFYKYLSKLLTKQEDSENFLEKIKNEDFLRKQRTFDNGSIPHQVHLTELKAIIRRQSEYYPFLKENQDRIEKILTFRIPYYIGPLAREKSDFAWMTRKTDDSIRPWNFEDLVDKEKSAEAFIHRMTNNDFYLPEEKVLPKHSLIYEKFTVYNELTKVRYKNEQGETYFFDSNIKQEIFDGVFKEHRKVSKKKLLDFLAKEYEEFRIVDVIGLDKENKAFNASLGTYHDLEKILDKDFLDNPDNESILEDIVQTLTLFEDREMIKKRLENYKDLFTESQLKKLYRRHYTGWGRLSAKLINGIRDKESQKTILDYLIDDGRSNRNFMQLINDDGLSFKSIISKAQAGSHSDNLKEVVGELAGSPAIKKGILQSLKIVDELVKVMGYEPEQIVVEMARENQTTNQGRRNSRQRYKLLDDGVKNLASNILKEYPTDNQALQNERLFLYYLQNGRDMYTGEALDIDNLSQYDIDHIIPQAFIKDDSIDNRVLVSSAKNRGKSDDVPSLEIVKDCKVFWKKLLDAKLMSQRKYDNLTKAERGGLTSDDKARFIQRQLVETRQITKHVARILDERFNNELDSKGRRIRKVKIVTLKSNLVSNFRKEFGFYKIREVNNYHHAHDAYLNAVVAKAILTKYPQLEPEFVYGDYPKYNSYKTRKATEKLFFYSNIMNFFKTKVTLADGTVVVKDDIEVNNDTGEIVWDKKKHFATVRKVLSYPQNNIVKKTEIQTGGFSKESILAHGNSDKLIPRKTKDIYLDPKKYGGFDSPIVAYSVLVVADIKKGKAQKLKTVTELLGITIMERSRFEKNPSAFLESKGYLNIRADKLIILPKYSLFELENGRRRLLASAGELQKGNELALPTQFMKFLYLASRYNESKGKPEEIEKKQEFVNQHVSYFDDILQLINDFSKRVILADANLEKINKLYQDNKENISVDELANNIINLFTFTSLGAPAAFKFFDKIVDRKRYTSTKEVLNSTLIHQSITGLYETRIDLGKLGED

SEQ ID NO: 54 - protein, 1365 aa, Streptococcus agalactiae
MNKPYSIGLDIGTNSVGWSIITDDYKVPAKKMRVLGNTDKEYIKKNLIGALLFDGGNTAADRRLKRTARRRYTRRRNRILYLQEIFAEEMSKVDDSFFHRLEDSFLVEEDKRGSKYPIFATMQEEKDYHEKFPTIYHLRKELADKKEKADLRLVYLALAHIIKFRGHFLIEDDRFDVRNTDIQKQYQAFLEIFDTSFENNHLLSQNVDVEAILTDKISKSAKKDRILAQYPNQKSTGIFAEFLKLIVGNQADFKKHFNLEDKTPLQFAKDSYDEDLENLLGQIGDEFADLFSAAKKLYDSVLLSGILTVTDLSTKAPLSAYMIQRYDEHREDLKQLKQFVKASLPEKYQEIFADSSKDGYAGYIEGKTNQEAFYKYLSKLLTKQEDSEYFLEKIKNEDFLRKQRTFDNGSIPHQVHLTELKAIIRRQSEYYPFLKENQDKIEKILTFRIPYYVGPLARGNSDFAWMTRKTDDSIRPWNFEDLVDKEKSAEAFIHRMTNNDLYLPEEKVLPKHSLIYEKFTVYNELTKVRYKNEQGETYFFDSNVKQEIFDGVFKEHRKVSKKQLLDFLAKEFEEFRIVDVTGLDKENKAFNASLGTYHDLKKILDKDFLDNPDNESILEDIVQTITLFEDREMIKKRLENYKDLFTESQLKKLYRRHYTGWGRLSAKLINGIRDRESQKTILDYLISDGRANRNFMQLINDDGLSFKSIISKAQSGSHSDNLKEVVGELAGSPAIKKGILQSLKIVDELVKVMGYEPEQIVVEMARENQTTNQGRRNSRQRYKLLEDGVKNLASDILKEYPTDNQALQNERLFLYYLQNGRDMYTGEALDIDNLSQYDIDHIVPQAFIKDDSIDNRVLVSSAKNRGKSDDVPSIDIVKARKAFWKKLLDAKLISQRKYDNLTKAERGGLTPDDKAGFIQRQLVETRQITKHVARILDERFNNKVDDNNKPIRKVKIVTLKSNLVSNFRKEFGFYKIREVNNYHHAHDAYLNAVVAKAILTKYPQLEPEFVYGDYPKYNSYKTRKATEKLFFYSNIMNFFKTKVTLADETVVVKDDIEVNNETGEIAWDKKKHFATVRKVLSYPQVNIVKKTEVQTGGFSKESILAHSNSDKLIPRKTKDIYLDPKKYGGFDSPIVAYSVLVLADIKKGKAQKLKTVKELIGITIMERERFEKNPSAFLESKGYLNIRTDKLIILPKYSLFELENGRRRLLASAGELQKGNELALPTQYMKFLYLASRYNESKGKPEEIEKKQEFVNQHISYFDDILQLINDFSKRVILADANLEKINKLYSDNKDNTPVDELAKNIINLFTFTSLGAPAAFKFFDKSVDRKRYTSTKEVLDSTLIHQSITGLYETRIDLGKLGED

SEQ ID NO: 55 - protein, 1365 aa, Streptococcus agalactiae
MNKPYSIGLDIGTNSVGWSIITDDYKVPAKKMRVLGNTDKEYIKKNLIGALLFDGGNTAADRRLKRTARRRYTRRRNRILYLQEIFAEEMSKVDDSFFHRLEDSFLVEEDKRGSKYPIFATMQEEKYYHEKFPTIYHLRKELADKKEKADLRLIYLALAHIIKFRGHFLIEDDRFDVRNTDIQKQYQAFLEIFDTTFENNDLLSQNVDVEAILTDKISKSAKKDRILARYPNQKSTGIFAEFLKLIVGNQADFKKHFNLEDKTPLQFAKDSYDEDLENLLGQIGDEFADLFSAAKKLYDSVLLSGILTVTDLSTKAPLSASMIQHYDEHREDLKQLKQFVKASLPEKYQEIFADSSKDGYAGYIEGKTNQEAFYKYLSKLLTKQEGSEYLLEKIKNEDFLRKQRTFDNGSIPHQVHLTELRAIIRRQSEYYPFLKENLDRIEKILTFRIPYYVGPLAREKSDFAWMTRKTDDSIRPWNFEDLVDKEKSAEAFIHRMTNNDLYLPEEKVLPKHSLIYEKFTVYNELTKVRFLAEGFKDFQFLNRKQKETIFNSLFKEKRKVTEKDIISFLNKVDGYEGIAIKGIEKQFNASLSTYHDLKKILGKDFLDNTDNELILEDIVQTLTLFEDREMIRKRLDIYKDFFTESQLKKLYRRHYTGWGRLSAKLINGIRNKENQKTILDYLIDDGSANRNFMQLIKDAGLSFKPIIDKARTGSHSDNLKEVVGELAGSPAIKKGILQSLKIVDELVKVMGYEPEQIVVEMARENQTTAKGLSRSRQRLTTLRESLANLKSEKKPKYVKDQVENHHLSDDRLFLYYLQNGKDMYTDDELDIDNLSQYDIDHIIPQAFIKDDSIDNRVLVSSAKNRGKSDDVPSVEIVKDCKVFWKKLLDAKLMSQRKYDNLTKAERGGLTSDDKARFIQRQLVETRQITKHVARILDERFNNELDSKGRRIRKVKIVTLKSNLVSNFRKEFGFYKIREVNNYHHAHDAYLNAVVAKAILTKYPQLEPEFVYGDYPKYNSYKTRKATEKLFFYSNIMNFFKTKVTLADGTVVVKDDIEVNNDTGEIVWDKKKHFATVRKVLSYPQVNIVKKTEIQTGGFSKESILAHGNSDKLIPRKTKDIYLDPKKYGGFDSPIVAYSVLVVADIKKGKAQKLKTVTELLGITIMERSRFEKNPSAFLESKGYLNIRDDKLMILPKYSLFELENGRRRLLASAGELQKGNELALPTQFMKFLYLASRYNELKGKPEEIEQKQEFVVQHVSYFDDILQIINDFSNRVILADANLEKINKLYQDNKENIPVDELANNIINLFTFTSLGAPAAFKFFDKIVDRKRYTSTKEVLNSTLIHQSITGLYETRIDLGKLGED

SEQ ID NO: 56 - protein, 1365 aa, Streptococcus agalactiae
MNKPYSIGLDIGTNSVGWSIITDDYKVPAKKMRVLGNTDKEYIKKNLIGALLFDGGNTAADRRLKRTARRRYTRRRNRILYLQEIFAEEMSKVDDSFFHRLEDSFLVEEDKRGSKYPIFATMQEEKYYHEKFPTIYHLRKELADKKEKADLRLIYLALAHIIKFRGHFLIEDDRFDVRNTDIQKQYQAFLEIFDTTFENNDLLSQNVDVEAILTDKISKSAKKDRILARYPNQKSTGIFAEFLKLIVGNQADFKKHFNLEDKTPLQFAKDSYDEDLENLLGQIGDEFADLFSAAKKLYDSVLLSGILTVTDLSTKAPLSASMIQRYDEHREDLKQLKQFVKASLPEKYQEIFADSSKDGYAGYIEGKTNQEAFYKYLSKLLTKQEGSEYLLEKIKNEDFLRKQRTFDNGSIPHQVHLTELRAIIRRQSEYYPFLKENLDRIEKILTFRIPYYVGPLAREKSDFAWMTRKTDDSIRPWNFEDLVDKEKSAEAFIHRMTNNDLYLPEEKVLPKHSLIYEKFTVYNELTKVRFLAEGFKDFQFLNRKQKETIFNSLFKEKRKVTEKDIISFLNKVDGYEGIAIKGIEKQFNASLSTYHDLKKILGKDFLDNTDNELILEDIVQTLTLFEDREMIRKRLDIYKDFFTESQLKKLYRRHYTGWERLSAKLINGIRNKENQKTILDYLIDDGSANRNFMQLIKDAGLSFKPIIDKARTGSHLDNLKEVVGELAGSPAIKKGILQSLKIVDELVKVMGYEPEQIVVEMARENQTTAKGLSRSRQRLTTLRESLANLKSEKKPKYVKDQVENHHLSDDRLFLYYLQNGKDMYTDDELDIDNLSQYDIDHIIPQAFIKDDSIDNRVLVSSAKNRGKSDDVPSLEIVKDCKVFWKKLLDAKLMSQRKYDNLTKAERGGLTSDDKARFIQRQLVETRQITKHVARILDERFNNELDSKGRRIRKVKIVTLKSNLVSNFRKEFGFYKIREVNNYHHAHDAYLNAVVAKAILTKYPQLEPEFVYGDYPKYNSYKTRKATEKLFFYSNIMNFFKTKVTLADGTVVVKDDIEVNNDTGEIVWDKKKHFATVRKVLSYPQVNIVKKTEVQTGGFSKESILAHGNSDKLIPRKTKDIYLDPKKYGGFDSPIVAYSVLVVADIKKGKAQKLKTVTELLGITIMERSRFEKNPSAFLESKGYLNIRTDKLIILPKYSLFELENGRRRLLASAGELQKGNELALPTQYMKFLYLASRYNELKGKPEEIEQKQEFVVQHVSYFDDILQIINDFSNRVILADANLEKINKLYQDNKENIPVDELANNIINLFTFTSLGAPAAFKFFDKIVDRKRYTSTKEVLNSTLIHQSITGLYETRIDLGKLGEG

SEQ ID NO: 57 - protein, 1365 aa, Streptococcus agalactiae
MNKPYSIGLDIGTNSVGWSIITDDYKVPAKKMRVLGNTDKEYIKKNLIGALLFDGGNTAADRRLKRTARRRYTRRRNRILYLQEIFAEEMSKVDDSFFHRLEDSFLVEEDKRGSKYPIFATMQEEKYYHEKFPTIYHLRKELADKKEKADLRLIYLALAHIIKFRGHFLIEDDRFDVRNTDIQKQYQAFLEIFDTTFENNDLLSQNVDVEAILTDKISKSAKKDRILARYPNQKSTGIFAEFLKLIVGNQADFKKHFNLEDKTPLQFAKDSYDEDLENLLGQIGDEFADLFSAAKKLYDSVLLSGILTVTDLSTKAPLSASMIQRYDEHREDLKQLKQFVKASLPEKYQEIFADSSKDGYAGYIEGKTNQEAFYKYLSKLLTKQEGSEYLLEKIKNEDFLRKQRTFDNGSIPHQVHLTELRAIIRRQSEYYPFLKENLDRIEKILTFRIPYYVGPLAREKSDFAWMTRKTDDSIRPWNFEDLVDKEKSAEAFIHRMTNNDLYLPEEKVLPKHSLIYEKFTVYNELTKVRFLAEGFKDFQFLNRKQKETIFNSLFKEKRKVTEKDIISFLNKVDGYEGIAIKGIEKQFNASLSTYHDLKKILGKDFLDNTDNELILEDIVQTLTLFEDREMIRKRLDIYKDFFTESQLKKLYRRHYTGWGRLSAKLINGIRNKENQKTILDYLIDDGSANRNFMQLIKDAGLSFKPIIDKARTGSHLDNLKEVVGELAGSPAIKKGILQSLKIVDELVKVMGYEPEQIVVEMARENQTTAKGLSRSRQRLTTLRESLANLKSEKKPKYVKDQVENHHLSDDRLFLYYLQNGKDMYTDDELDIDNLSQYDIDHIIPQAFIKDDSIDNRVLVSSAKNRGKSDDVPSLEIVKDCKVFWKKLLDAKLMSQRKYDNLTKAERGGLTSDDKARFIQRQLVETRQITKHVARILDERFNNELDSKGRRIRKVKIVTLKSNLVSNFRKEFGFYKIREVNNYHHAHDAYLNAVVAKAILTKYPQLEPEFVYGDYPKYNSYKTRKATEKLFFYSNIMNFFKTKVTLADGTVVVKDDIEVNNDTGEIVWDKKKHFATVRKVLSYPQVNIVKKTEVQTGGFSKESILAHGNSDKLIPRKTKDIYLDPKKYGGFDSPIVAYSVLVVADIKKGKAQKLKTVTELLGITIMERSRFEKNPSAFLESKGYLNIRTDKLIILPKYSLFELENGRRRLLASAGELQKGNELALPTQYMKFLYLASRYNELKGKPEEIEQKQEFVVQHVSYFDDILQIINDFSNRVILADANLEKINKLYQDNKENIPVDELANNIINLFTFTSLGAPAAFKFFDKIVDRKRYTSTKEVLNSTLIHQSITGLYETRIDLGKLGEG

SEQ ID NO: 58 - protein, 1365 aa, Streptococcus agalactiae
MNKPYSIGLDIGTNSVGWSIITDDYKVPAKKMRVLGNTDKEYIKKNLIGALLFDGGNTAADRRLKRTARRRYTRRRNRILYLQEIFAEEMSKVDDSFFHRLEDSFLVEEDKRGSKYPIFATMQEEKYYHEKFPTIYHLRKELADKKEKADLRLIYLALAHIIKFRGHFLIEDDRFDVRNTDIQKQYQAFLEIFDTTFENNDLLSQNVDVEAILTDKISKSAKKDRILARYPNQKSTGIFAEFLKLIVGNQADFKKHFNLEDKTPLQFAKDSYDEDLENLLGQIGDEFADLFSAAKKLYDSVLLSGILTVTDLSTKAPLSASMIQRYDEHREDLKQLKQFVKASLPEKYQEIFADSSKDGYAGYIEGKTNQEAFYKYLSKLLTKQEGSEYLLEKIKNEDFLRKQRTFDNGSIPHQVHLTELRAIIRRQSEYYPFLKENLDRIEKILTFRIPYYVGPLAREKSDFAWMTRKTDDSIRPWNFEDLVDKEKSAEAFIHRMTNNDLYLPEEKVLPKHSLIYEKFTVYNELTKVRFLAEGFKDFQFLNRKQKETIFNSLFKEKRKVTEKDIISFLNKVDGYEGIAIKGIEKQFNASLSTYHDLKKILGKDFLDNTDNELILEDIVQTLTLFEDREMIRKRLDIYKDFFTESQLKKLYRRHYTGWGRLSAKLINGIRNKENQKTILDYLIDDGSANRNFMQLIKDAGLSFKPIIDKARTGSHSDNLKEVVGELAGSPAIKKGILQSLKIVDELVKVMGYEPEQIVVEMARENQTTAKGLSRLRQRLTTLRESLANLKSEKKPKYVKDQVENHHLSDDRLFLYYLQNGKDMYTDDELDIDNLSQYDIDHIIPQAFIKDDSIDNRVLVSSAKNRGKSDDVPSVEIVKDCKVFWKKLLDAKLMSQRKYDNLTKAERGGLTSDDKARFIQRQLVETRQITKHVARILDERFNNELDSKGRRIRKVKIVTLKSNLVSNFRKEFGFYKIREVNNYHHAHDAYLNAVVAKAILTKYPQLEPEFVYGDYPKYNSYKTRKATEKLFFYSNIMNFFKTKVTLADGTVVVKDDIEVNNDTGEIVWDKKKHFATVRKVLSYPQVNIVKKTEIQTGGFSKESILAHGNSDKLIPRKTKDIYLDPKKYGGFDSPIVAYSVLVVADIKKGKAQKLKTVTELLGITIMERSRFEKNPSAFLESKGYLNIRDDKLMILPKYSLFELENGRRRLLASADELQKGNELALPTQFMKFLYLASRYNELKGKPEEIEQKQEFVVQHVSYFDDILQIINDFSNRVILADANLEKINKLYQDNKENIPVDELANNIINLFTFTSLGAPAAFKFFDKIVDRKRYTSTKEVLNSTLIHQSITGLYETRIDLGKLGED

SEQ ID NO: 59 - protein, 1365 aa, Streptococcus agalactiae
MNKPYSIGLDIGTNSVGWSIITDDYKVPAKKMRVLGNTDKEYIKKNLIGALLFDGGNTAADRRLKRTARRRYTRRRNRILYLQEIFAEEMSKVDDSFFHRLEDSFLVEEDKRGSKYPIFATMQEEKYYHEKFPTIYHLRKELADKKEKADLRLIYLALAHIIKFRGHFLIEDDRFDVRNTDIQKQYQAFLEIFDTTFENNDLLSQNVDVEAILTDKISKSAKKDRILARYPNQKSTGIFAEFLKLIVGNQADFKKHFNLEDKTPLQFAKDSYDEDLENLLGQIGDEFADLFSAAKKLYDSVLLSGILTVTDLSTKAPLSASMIQRYDEHREDLKQLKQFVKASLPEKYQEIFADSSKDGYAGYIEGKTNQEAFYKYLSKLLTKQEGSEYLLEKIKNEDFLRKQRTFDNGSIPHQVHLTELRAIIRRQSEYYPFLKENLDRIEKILTFRIPYYVGPLAREKSDFAWMTRKTDDSIRPWNFEDLVDKEKSAEAFIHRMTNNDLYLPEEKVLPKHSLIYEKFTVYNELTKVRFLAEGFKDFQFLNRKQKETIFNSLFKEKRKVTEKDIISFLNKVDGYEGIAIKGIEKQFNASLSTYHDLKKILGKDFLDNTDNELILEDIVQTLTLFEDREMIRKRLDIYKDFFTESQLKKLYRRHYTGWGRLSAKLINGIRNKENQKTILDYLIDDGSANRNFMQLIKDAGLSFKPIIDKARTGSHSDNLKEVVGELAGSPAIKKGILQSLKIVDELVKVMGYEPEQIVVEMARENQTTAKGLSRSRQRLTTLRESLANLKSEKKPKYVKDQVENHHLSDDRLFLYYLQNGKDMYTDDELDIDNLSQYDIDHIIPQAFIKDDSIDNRVLVSSAKNRGKSDDVPSVEIVKDCKVFWKKLLDAKLMSQRKYDNLTKAERGGLTSDDKARFIQRQLVETRQITKHVARILDERFNNELDSKGRRIRKVKIVTLKSNLVSNFRKEFGFYKIREVNNYHHAHDAYLNAVVAKAILTKYPQLEPEFVYGDYPKYNSYKTRKATEKLFFYSNIMNFFKTKVTLADGTVVVKDDIEVNNDTGEIVWDKKKHFATVRKVLSYPQVNIVKKTEIQTGGFSKESILAHGNSDKLIPRKTKDIYLDPKKYGGFDSPIVAYSVLVVADIKKGKAQKLKTVTELLGITIMERSRFEKNPSAFLESKGYLNIRDDKLMILPKYSLFELENGRRRLLASAGELQKGNELALPTQFMKFLYLASRYNELKGKPEEIEQKQEFVVQHVSYFDDILQIINDFSNRVILADANLEKINKLYQDNKENIPVDELANNIINLFTFTSLGAPAAFKFFDKIVDRKRYTSTKEVLNSTLIHQSITGLYETRIDLGKLGED

SEQ ID NO: 60 - protein, 1365 aa, Streptococcus agalactiae
MNKPYSIGLDIGTNSVGWSIITDDYKVPAKKMRVLGNTDKEYIKKNLIGALLFDGGNTAADRRLKRTARRRYTRRRNRILYLQEIFAEEMSKVDDSFFHRLEDSFLVEEDKRGSKYPIFATMQEEKYYHEKFPTIYHLRKELADKKEKADLRLIYLALAHIIKFRGHFLIEDDRFDVRNTDIQKQYQAFLEIFDTTFENNDLLSQNVDVEAILTDKISKSAKKDRILARYPNQKSTGIFAEFLKLIVGNQADFKKHFNLEDKTPLQFAKDSYDEDLENLLGQIGDEFADLFSAAKKLYDSVLLSGILTVTDLSTKAPLSASMIQRYDEHREDLKQLKQFVKASLPEKYQEIFADSSKDGYAGYIEGKTNQEAFYKYLSKLLTKQEGSEYLLEKIKNEDFLRKQRTFDNGSIPHQVHLTELRAIIRRQSEYYPFLKENLDRIEKILTFRIPYYVGPLAREKSDFAWMTRKTDDSIRPWNFEDLVDKEKSAEAFIHRMTNNDLYLPEEKVLPKHSLIYEKFTVYNELTKVRFLAEGFKDFQFLNRKQKETIFNSLFKEKRKVTEKDIISFLNKVDGYEGIAIKGIEKQFNASLSTYHDLKKILGKDFLDNTDNELILEDIVQTLTLFEDREMIRKRLDIYKDFFTESQLKKLYRRHYTGWGRLSAKLINGIRNKENQKTILDYLIDDGSANRNFMQLIKDAGLSFKPIIDKARTGSHSDNLKEVVGELAGSPAIKKGILQSLKIVDELVKVMGYEPEQIVVEMARENQTTAKGLSRSRQRLTTLRESLANLKSEKKPKYVKDQVENHHLSDDRLFLYYLQNGKDMYTDDELDIDNLSQYDIDHIIPQAFIKDDSIDNRVLVSSAKNRGKSDDVPSVEIVKDCKVFWKKLLDAKLMSQRKYDNLTKAERGGLTSDDKARFIQRQLVETRQITKHVARILDERFNNELDSKGRRIRKVKIVTLKSNLVSNFRKEFGFYKIREVNNYHHAHDAYLNAVVAKAILTKYPQLEPEFVYGDYPKYNSYKTRKATEKLFFYSNIMNFFKTKVTLADGTVVVKDDIEVNNDTGEIVWDKKKHFATVRKVLSYPQVNIVKKTEIQTGGFSKESILAHGNSDKLIPRKTKDIYLDPKKYGGFDSPKVAYSVLVVADIKKGKAQKLKTVTELLGITIMERSRFEKNPSAFLESKGYLNIRDDKLMILPKYSLFELENGRRRLLASAGELQKGNELALPTQFMKFLYLASRYNELKGKPEEIEQKQEFVVQHVSYFDDILQIINDFSNRVILADANLEKINKLYQDNKENIPVDELANNIINLFTFTSLGAPAAFKFFDKIVDRKRYTSTKEVLNSTLIHKSITGLYETRIDLGKLGED

SEQ ID NO: 61 - protein, 1365 aa, Streptococcus agalactiae
MNKPYSIGLDIGTNSVGWSIITDDYKVPAKKMRVLGNTDKEYIKKNLIGALLFDGGNTAADRRLKRTARRRYTRRRNRILYLQEIFAEEMSKVDDSFFHRLEDSFLVEEDKRGSKYPIFATMQEEKYYHEKFPTIYHLRKELADKKEKADLRLIYLALAHIIKFRGHFLIEDDRFDVRNTDIQKQYQAFLEIFDTTFENNDLLSQNVDVEAILTDKISKSAKKDRILARYPNQKSTGIFAEFLKLIVGNQADFKKHFNLEDKTPLQFAKDSYDEDLENLLGQIGDEFADLFSAAKKLYDSVLLSGILTVTDLSTKAPLSASMIQRYDEHREDLKQLKQFVKASLPEKYQEIFADSSKDGYAGYIEGKTNQEAFYKYLSKLLTKQEGSEYLLEKIKNEDFLRKQRTFDNGSIPHQVHLTELRAIIRRQSEYYPLLKENLDRIEKILTFRIPYYVGPLAREKSDFAWMTRKTDDSIRPWNFEDLVDKEKSAEAFIHRMTNNDLYLPEEKVLPKHSLIYEKFTVYNELTKVRFLAEGFKDFQFLNRKQKETIFNSLFKEKRKVTEKDIISFLNKVDGYEGIAIKGIEKQFNASLSTYHDLKKILGKDFLDNTDNELILEDIVQTLTLFEDREMIRKRLDIYKDFFTESQLKKLYRRHYTGWGRLSAKLINGIRNKENQKTILDYLIDDGSANRNFMQLIKDAGLSFKPIIDKARTGSHSDNLKEVVGELAGSPAIKKGILQSLKIVDELVKVMGYEPEQIVVEMARENQTTAKGLSRSRQRLTTLRESLANLKSEKKPKYVKDQVENHHLSDDRLFLYYLQNGKDMYTDDELDIDNLSQYDIDHIIPQAFIKDDSIDNRVLVSSAKNRGKSDDVPSVEIVKDCKVFWKKLLDAKLMSQRKYDNLTKAERGGLTSDDKARFIQRQLVETRQITKHVARILDERFNNELDSKGRRIRKVKIVTLKSNLVSNFRKEFGFYKIREVNNYHHAHDAYLNAVVAKAILTKYPQLEPEFVYGDYPKYNSYKTRKATEKLFFYSNIMNFFKTKVTLADGTVVVKDDIEVNNDTGEIVWDKKKHFATVRKVLSYPQVNIVKKTEIQTGGFSKESILAHGNSDKLIPRKTKDIYLDPKKYGGFDSPIVAYSVLVVADIKKGKAQKLKTVTELLGITIMERSRFEKNPSAFLESKGYLDIRDDKLMILPKYSLFELENGRRRLLASAGELQKGNELALPTQFMKFLYLASRYNELKGKPEEIEQKQEFVVQHVSYFDDILQIINDFSNRVILADANLEKINKLYQDNKENIPVDELANNIINLFTFTSLGAPAAFKFFDKIVDRKRYTSTKEVLNSTLIHQSITGLYETRIDLGKLGED

SEQ ID NO: 62 - protein, 1365 aa, Streptococcus agalactiae
  VARIANT 117: note = X can be any naturally occurring amino acid
MNKPYSIGLDIGTNSVGWSIITDDYKVPAKKMRVLGNTDKEYIKKNLIGALLFDGGNTAADRRLKRTARRRYTRRRNRILYLQEIFAEEMSKVDDSFFHRLEDSFLVEEDKRGSKYXIFATLQEEKDYHEKFSTIYHLRKELADKKEKADLRLIYIALAHIIKFRGHFLIEDDSFDVRNTDISKQYQDFLEIFNTTFENNDLLSQNVDVEAILTDKISKSAKKDRILAQYPNQKSTGIFAEFLKLIVGNQADFKKYFNLEDKTPLQFAKDSYDEDLENLLGQIGDEFADLFSAAKKLYDSVLLSGILTVIDLSTKAPLSASMIQRYDEHREDLKQLKQFVKASLPEKYQEIFADSSKDGYAGYIEGKTNQEAFYKYLSKLLTKQEDSENFLEKIKNEDFLRKQRTFDNGSIPHQVHLTELKAIIRRQSEYYPFLKENQDRIEKILTFRIPYYIGPLAREKSDFAWMTRKTDDSIRPWNFEDLVDKEKSAEAFIHRMTNNDFYLPEEKVLPKHSLIYEKFTVYNELTKVRYKNEQGETYFFDSNIKQEIFDGVFKEHRKVSKKKLLDFLAKEYEEFRIVDVIGLDKENKAFNASLGTYHDLEKILDKDFLDNPDNESILEDIVQTLTLFEDREMIKKRLENYKDLFTESQLKKLYRRHYTGWGRLSAKLINGIRDKESQKTILDYLIDDGRSNRNFMQLINDDGLSFKSIISKAQAGSHSDNLKEVVGELAGSPAIKKGILQSLKIVDELVKVMGYEPEQIVVEMARENQTTNQGRRNSRQRYKLLDDGVKNLASNILKEYPTDNQALQNERLFLYYLQNGRDMYTGEALDIDNLSQYDIDHIIPQAFIKDDSIDNRVLVSSAKNRGKSDDVPSLEIVKDCKVFWKKLLDAKLMSQRKYDNLTKAERGGLTSDDKARFIQRQLVETRQITKHVARILDERFNNELDSKGRRIRKVKIVTLKSNLVSNFRKEFGFYKIREVNNYHHAHDAYLNAVVAKAILTKYPQLEPEFVYGDYPKYNSYKTRKATEKLFFYSNIMNFFKTKVTLADGTVVVKDDIEVNNDTGEIVWDKKKHFATVRKVLSYPQNNIVKKTEIQTGGFSKESILAHGNSDKLIPRKTKDIYLDPKKYGGFDSPIVAYSVLVVADIKKGKAQKLKTVTELLGITIMERSRFEKNPSAFLESKGYLNIRADKLIILPKYSLFELENGRRRLLASAGELQKGNELALPTQFMKFLYLASRYNESKGKPEEIEKKQEFVNQHVSYFDDILQLINDFSKRVILADANLEKINKLYQDNKENISVDELANNIINLFTFTSLGAPAAFKFFDKIVDRKRYTSTKEVLNSTLIHQSITGLYETRIDLGKLGED

SEQ ID NO: 63 - protein, 1365 aa, Streptococcus agalactiae
MNKPYSIGLDIGTNSVGWSIITDDYKVPAKKMRVLGNTDKEYIKKNLIGALLFDGGNTAADRRLKRTSRRRYTRRRNRILYLQEIFAEEMSKVDDSFFHRLEDSFLVEEDKRGSKYPIFATLQEEKDYHEKFSTIYHLRKELADKKEKADLRLIYIALAHIIKFRGHFLIEDDSFDVRNTDISKQYQDFLEIFNTTFENNDLLSQNVDVEAILTDKISKSAKKDRILAQYPNQKSTGIFAEFLKLIVGNQADFKKYFNLEDKTPLQFAKDSYDEDLENLLGQIGDEFADLFSAAKKLYDSVLLSGILTVIDLSTKAPLSASMIQRYDEHREDLKQLKQFVKASLPEKYQEIFADSSKDGYAGYIEGKTNQEAFYKYLSKLLTKQEDSENFLEKIKNEDFLRKQRTFDNGSIPHQVHLTELKAIIRRQSEYYPFLKENQDRIEKILTFRIPYYIGPLAREKSDFAWMTRKTDDSIRPWNFEDLVDKEKSAEAFIHRMTNNDFYLPEEKVLPKHSLIYEKFTVYNELTKVRYKNEQGETYFFDSNIKQEIFDGVFKEHRKVSKKKLLDFLAKEYEEFRIVDVIGLDKENKAFNASLGTYHDLEKILDKDFLDNPDNESILEDIVQTLTLFEDREMIKKRLENYKDLFTESQLKKLYRRHYTGWGRLSAKLINGIRDKESQKTILDYLIDDGRSNRNFMQLINDDGLSFKSIISKAQAGSHSDNLKEVVGELAGSPAIKKGILQSLKIVDELVKVMGYEPEQIVVEMARENQTTNQGRRNSRQRYKLLDDGVKNLASNILKEYPTDNQALQNERLFLYYLQNGRDMYTGEALDIDNLSQYDIDHIIPQAFIKDDSIDNRVLVSSAKNRGKSDDVPSLEIVKDCKVFWKKLLDAKLMSQRKYDNLTKAERGGLTSDDKARFIQRQLVETRQITKHVARILDERFNNELDSKGRRIRKVKIVTLKSNLVSNFRKEFGFYKIREVNNYHHAHDAYLNAVVAKAILTKYPQLEPEFVYGDYPKYNSYKTRKATEKLFFYSNIMNFFKTKVTLADGTVVVKDDIEVNNDTGEIVWDKKKHFATVRKVLSYPQNNIVKKTEIQTGGFSKESILAHGNSDKLIPRKTKDIYLDPKKYGGFDSPIVAYSVLVVADIKKGKAQKLKTVTELLGITIMERSRFEKNPSAFLESKGYLNIRADKLIILPKYSLFELENGRRRLLASAGELQKGNELALPTQFMKFLYLASRYNESKGKPEEIEKKQEFVNQHVSYFDDILQLINDFSKRVILADANLEKINKLYQDNKENISVDELANNIINLFTFTSLGAPAAFKFFDKIVDRKRYTSTKEVLNSTLIHQSITGLYETRIDLGKLGED

SEQ ID NO: 64 - protein, 1365 aa, Streptococcus agalactiae
MNKPYSIGLDIGTNSVGYSVVTDDYKVPAKKMRVLGNTDKEYIKKNLIGALLFDGGNTASDRRLKRTARRRYTCRRNRILYLQEIFAEEMSKVDDSFFHRLEDSFLVEDDKRGSKYPIFATMQEEKDYHEKFPTIYHLRKELADKKEKANLRLVYLALAHIIKFRGHFLIEDDSFDVRNTDIQRQYQAFLEIFDTTFENNHLLSQNIDVEGILTDKISKSAKKDRILAQYPNQKSTGIFAEFLKLIVGNQADFKKHFNLEDKTPLQFAKDSYDEDLENLLGQIGDEFADLFSVAKKLYDSVLLSGILTVTDLSTKAPLSASMIQRYDEHREDLKQLKQFVKASLPEKYQEIFTDSSKDGYAGYIEGKTNQGAFYKYLSKLLTKQEGSEYFLEKIKNEDFLRKQRTFDNGSIPHQVHLTELKAIIRRQSEYYPFLKENLDRIEKILTFRIPYYVGPLAREKSDFAWMTRKTDDSIRPWNFEELVDKEASAEAFIHRMTNNDLYLPEEKVLPKHSLIYEKFTVYNELTKVRYKNEQGETYFFDSNIKQEIFDGVFKEHRKVSKKKLLDFLAKEYEEFRIVDVIGLDKENKAFNASLGTYHDLKKILDKDFLDNPDNESILEDIVQTLTLFEDREMIKKRLENYKDLFTESQLKKLYRRHYTGWGRLSAKLINGIRDKESQKTILDYLISDGRANRNFMQLIHDDGLSFKPIIDKAQAGSHSDNLKEVVGELAGSPAIKKGILQSLKIVDELVKVMGYEPEQVVVEMARENQTTNQGRRNTRQRYKLLEEGVKNLASNILKEYPTDNQALQNERLFLYYLQNGRDMYTGEALDIDNLSQYDIDHIVPQAFIKDDSIDNRVLVSSAKNRGKSDNVPSIDIVKARKAFWKKLLDAKLMSQRKYDNLTKAERGGLTSDDKARFIQRQLVETRQITKHVARILDERFNNELDSKGRRIRKVKIVTLKSNLVSNFRKEFGFYKIREVNDYHHAHDAYLNAVVAKAILTKYPQLEPEFVYGDYPKYNSYKTRKATEKLFFYSNIMNFFKTKVTLADGTVVVKDDIEVNNDTGEIVWDKKKHFATVRKVLSYPQVNIVKKTEIQTGGFSKESILAHGNSDKLIPRKTKDIYLDPKKYGGFDSPIVAYSVLVVADIKKGKAQKLKTVTELLGITIMERFRFEKNPSAFLESKGYLNIRDDKLMILPKYSLFELENGRRRLLASAGELQKGNELALPTQYMKFLYLASRYNELKGKPEEIEQKQEFVVQHVSYFDDILQIINDFSNRVILADANLEKINKLYQDNKENISVDELANNIINLFTFTSLGAPAAFKFFDKIVDRKRYTSTKEVLNSTLIHQSITGLYETRIDLGKLGED

SEQ ID NO: 65 - protein, 1365 aa, Streptococcus agalactiae
MNKPYSIGLDIGTNSVGYSVVTDDYKVPAKKMRVLGNTDKEYIKKNLIGALLFDGGNTASDRRLKRTARRRYTRRRNRILYLQEIFAEEMSKVDDSFFHRLEDSFLVEDDKRGSKYPIFATMQEEKDYHEKFPTIYHLRKELADKKEKADLRLVYLALAHIIKFRGHFLIEDDSFDVRNTDIQRQYQAFLEIFDTTFENNHLLSQNIDVEGILTDKISKSAKKDRILAQYPNQKSTGIFAEFLKLIVGNQADFKKHFNLEDKTPLQFAKDSYDEDLENLLGQIGDEFADLFSVAKKLYDSVLLSGILTVTDLSTKAPLSASMIQRYDEHREDLKQLKQFVKASLPEKYQEIFTDSSKDGYAGYIEGKTNQGAFYKYLSKLLTKQEGSEYFLEKIKNEDFLRKQRTFDNGSIPHQVHLTELKAIIRRQSEYYPFLKENLDRIEKILTFRIPYYVGPLAREKSDFAWMTRKTDDSIRPWNFEELVDKEASAEAFIHRMTNNDLYLPEEKVLPKHSLIYEKFTVYNELTKVRYKNEQGETYFFDSNIKQEIFDGVFKEHRKVSKKKLLDFLAKEYEEFRIVDVIGLDKENKAFNASLGTYHDLKKILDKDFLDNPDNESILEDIVQTLTLFEDREMIKKRLENYKDLFTESQLKKLYRRHYTGWGRLSAKLINGIRDKESQKTILDYLISDGRANRNFMQLIHDDGLSFKPIIDKAQAGSHSDNLKEVVGELAGSPAIKKGILQSLKIVDELVKVMGYEPEQVVVEMARENQTTNQGRRNTRQRYKLLEEGVKNLASNILKEYPTDNQALQNERLFLYYLQNGRDMYTGEALDIDNLSQYDIDHIVPQAFIKDDSIDNRVLVSSAKNRGKSDNVPSIDIVKARKAFWKKLLDAKLMSQRKYDNLTKAERGGLTSDDKARFIQRQLVETRQITKHVARILDERFNNELDSKGRRIRKVKIVTLKSNLVSNFRKEFGFYKIREVNDYHHAHDAYLNAVVAKAILTKYPQLEPEFVYGDYPKYNSYKTRKATEKLFFYSNIMNFFKTKVTLADGTVVVKDDIEVNNDTGEIVWDKKKHFATVRKVLSYPQVNIVKKTEIQTGGFSKESILAHGNSDKLIPRKTKDIYLDPKKYGGFDSPIVAYSVLVVADIKKGKAQKLKTVTELLGITIMERFRFEKNPSAFLESKGYLNIRDDKLMILPKYSLFELENGRRRLLASAGELQKGNELALPTQYMKFLYLASRYNELKGKPEEIEQKQEFVVQHVSYFDDILQIINDFSNRVILADANLEKINKLYQDNKENISVDELANNIINLFTFTSLGAPAAFKFFDKIVDRKRYTSTKEVLNSTLIHQSITGLYETRIDLGKLGED

SEQ ID NO: 66 - protein, 1365 aa, Streptococcus agalactiae
MNKPYSIGLDIGTNSVGYSVVTDDYKVPAKKMRVLGNTDKEYIKKNLIGALLFDGGNTASDRRLKRTARRRYTRRRNRILYLQEIFAEEMSKVDDSFFHRLEDSFLVEDDKRGSKYPIFATMQEEKDYHEKFPTIYHLRKELADKKEKADLRLVYLALAHIIKFRGHFLIEDDSFDVRNTDIQRQYQAFLEIFDTTFENNHLLSQNIDVEGILTDKISKSAKKDRILAQYPNQKSTGIFAEFLKLIVGNQADFKKHFNLEDKTPLQFAKDSYDEDLENLLGQIGDEFADLFSVAKKLYDSVLLSGILTVTDLSTKAPLSASMIQRYDEHREDLKQLKQFVKASLPEKYQEIFTDSSKDGYAGYIEGKTNQGAFYKYLSKLLTKQEGSEYFLEKIKNEDFLRKQRTFDNGSIPHQVHLTELKAIIRRQSEYYPFLKENLDRIEKILTFRIPYYVGPLAREKSDFAWMTRKTDDSIRPWNFEELVDKEASAEAFIHRMTNNDLYLPEEKVLPKHSLIYEKFTVYNELTKVRYKNEQGETYFFDSNIKQEIFDGVFKEHRKVSKKKLLDFLAKEYEEFRIVDVIGLDKENKAFNASLGTYHDLKKILDKDFLDNPDNESILEDIVQTLTLFEDREMIKKRLENYKDLFTESQLKKLYRRHYTGWGRLSAKLINGIRDKESQKTILDYLISDGRANRNFMQLIHDDGLSFKPIIDKAQAGSHSDNLKEVVGELAGSPAIKKGILQSLKIVDELVKVMGYEPEQVVVEMARENQTTNQGRRNTRQRYKLLEEGVKNLASNILKEYPTDNQALQNERLFLYYLQNGRDMYTGETLDIDNLSQYDIDHIVPQAFIKDDSIDNRVLVSSAKNRGKSDNVPSIDIVKARKAFWKKLLDAKLMSQRKYDNLTKAERGGLTSDDKARFIQRQLVETRQITKHVARILDERFNNELDSKGRRIRKVKIVTLKSNLVSNFRKEFGFYKIREVNDYHHAHDAYLNAVVAKAILTKYPQLEREFVYGDYPKYNSYKTRKATEKLFFYSNIMNFFKTKVTLADGTVVVKDDIEVNNDTGEIVWDKKKHFATVRKVLSYPQVNIVKKTEIQTGGFSKESILAHGNSDKLIPRKTKDIYLDPKKYGGFDSPIVAYSVLVVADIKKGKAQKLKTVTELLGITIMERFRFEKNPSAFLESKGYLNIRDDKLMILPKYSLFELENGRRRLLASAGELQKGNELALPTQYMKFLYLASRYNELKGKPEEIEQKQEFVVQHVSYFDDILQIINDFSNRVILADANLEKINKLYQDNKENISVDELANNIINLFTFTSLGAPAAFKFFDKIVDRKRYTSTKEVLNSTLIHQSITGLYETRIDLGKLGED

SEQ ID NO: 67 - protein, 1365 aa, Streptococcus agalactiae
MNKPYSIGLDIGTNSVGYSVVTDDYKVPAKKMRVLGNTDKEYIKKNLIGALLFDGGNTASDRRLKRTARRRYTRRRNRILYLQEIFAEEMSKVDDSFFHRLEDSFLVEDDKRGSKYPIFATMQEEKDYHEKFPTIYHLRKELADKKEKANLRLVYLALAHIIKFRGHFLIEDDSFDVRNTDIQRQYQAFLEIFDTTFENNHLLSQNIDVEGILTDKISKSAKKDRILAQYPNQKSTGIFAEFLKLIVGNQADFKKHFNLEDKTPLQFAKDSYDEDLENLLGQIGDEFADLFSVAKKLYDSVLLSGILTVTDLSTKAPLSASMIQRYDEHREDLKQLKQFVKASLPEKYQEIFTDSSKDGYAGYIEGKTNQGAFYKYLSKLLTKQEGSEYFLEKIKNEDFLRKQRTFDNGSIPHQVHLTELKAIIRRQSEYYPFLKENLDRIEKILTFRIPYYVGPLAREKSDFAWMTRKTDDSIRPWNFEELVDKEASAEAFIHRMTNNDLYLPEEKVLPKHSLIYEKFTVYNELTKVRYKNEQGETYFFDSNIKQEIFDGVFKEHRKVSKKKLLDFLAKEYEEFRIVDVIGLDKENKAFNASLGTYHDLKKILDKDFLDNPDNESILEDIVQTLTLFEDREMIKKRLENYKDLFTESQLKKLYRRHYTGWGRLSAKLINGIRDKESQKTILDYLISDGRANRNFMQLIHDDGLSFKPIIDKAQAGSHSDNLKEVVGELAGSPAIKKGILQSLKIVDELVKVMGYEPEQVVVEMARENQTTNQGRRNTRQRYKLLEEGVKNLASNILKEYPTDNQALQNERLFLYYLQNGRDMYTGEALDIDNLSQYDIDHIVPQAFIKDDSIDNRVLVSSAKNRGKSDNVPSIDIVKARKAFWKKLLDAKLMSQRKYDNLTKAERGGLTSDDKARFIQRQLVETRQITKHVARILDERFNNELDSKGRRIRKVKIVTLKSNLVSNFRKEFGFYKIREVNDYHHAHDAYLNAVVAKAILTKYPQLEPEFVYGDYPKYNSYKTRKATEKLFFYSNIMNFFKTKVTLADGTVVVKDDIEVNNDTGEIVWDKKKHFATVRKVLSYPQVNIVKKTEIQTGGFSKESILAHGNSDKLIPRKTKDIYLDPKKYGGFDSPIVAYSVLVVADIKKGKAQKLKTVTELLGITIMERFRFEKNPSAFLESKGYLNIRDDKLMILPKYSLFELENGRRRLLASAGELQKGNELALPTQYMKFLYLASRYNELKGKPEEIEQKQEFVVQHVSYFDDILQIINDFSNRVILADANLEKINKLYQDNKENISVDELANNIINLFTFTSLGAPAAFKFFDKIVDRKRYTSTKEVLNSTLIHQFITGLYETRIDLGKLGED

SEQ ID NO: 68 - protein, 1365 aa, Streptococcus agalactiae
MNKPYSIGLDIGTNSVGYSVVTDDYKVPAKKMRVLGNTDKEYIKKNLIGALLFDGGNTASDRRLKRTARRRYTRRRNRILYLQEIFAEEMSKVDDSFFHRLEDSFLVEDDKRGSKYPIFATMQEEKDYHEKFPTIYHLRKELADKKEKANLRLVYLALAHIIKFRGHFLIEDDSFDVRNTDIQRQYQAFLEIFDTTFENNHLLSQNIDVEGILTDKISKSAKKDRILAQYPNQKSTGIFAEFLKLIVGNQADFKKHFNLEDKTPLQFAKDSYDEDLENLLGQIGDEFADLFSVAKKLYDSVLLSGILTVTDLSTKAPLSASMIQRYDEHREDLKQLKQFVKASLPEKYQEIFTDSSKDGYAGYIEGKTNQGAFYKYLSKLLTKQEGSEYFLEKIKNEDFLRKQRTFDNGSIPHQVHLTELKAIIRRQSEYYPFLKENLDRIEKILTFRIPYYVGPLAREKSDFAWMTRKTDDSIRPWNFEELVDKEASAEAFIHRMTNNDLYLPEEKVLPKHSLIYEKFTVYNELTKVRYKNEQGETYFFDSNIKQEIFDGVFKEHRKVSKKKLLDFLAKEYEEFRIVDVIGLDKENKAFNASLGTYHDLKKILDKDFLDNPDNESILEDIVQTLTLFEDREMIKKRLENYKDLFTESQLKKLYRRHYTGWGRLSAKLINGIRDKESQKTILDYLISDGRANRNFMQLIHDDGLSFKPIIDKAQAGSHSDNLKEVVGELAGSPAIKKGILQSLKIVDELVKVMGYEPEQVVVEMARENQTTNQGRRNTRQRYKLLEEGVKNLASNILKEYPTDNQALQNERLFLYYLQNGRDMYTGEALDIDNLSQYDIDHIVPQAFIKDDSIDNRVLVSSAKNRGKSDNVPSIDIVKARKAFWKKLLDAKLMSQRKYDNLTKAERGGLTSDDKARFIQRQLVETRQITKHVARILDERFNNELDSKGRRIRKVKIVTLKSNLVSNFRKEFGFYKIREVNDYHHAHDAYLNAVVAKAILTKYPQLEPEFVYGDYPKYNSYKTRKATEKLFFYSNIMNFFKTKVTLADGTVVVKDDIEVNNDTGEIVWDKKKHFATVRKVLSYPQVNIVKKTEIQTGGFSKESILAHGNSDKLIPRKTKDIYLDPKKYGGFDSPIVAYSVLVVADIKKGKAQKLKTVTELLGITIMERFRFEKNPSAFLESKGYLNIRDDKLMILPKYSLFELENGRRRLLASAGELQKGNELALPTQYMKFLYLASRYNELKGKPEEIEQKQEFVVQHVSYFDDILQIINDFSNRVILADANLEKINKLYQDNKENISVDELANNIINLFTFTSLGAPAAFKFFDKIVDRKRYTSTKEVLNSTLIHQSITGLYETRIDLGKLGED

SEQ ID NO: 69 - protein, 1365 aa, Streptococcus agalactiae
MNKPYSIGLDIGTNSVGWSIITDDYKVPAKKMRVLGNTDKEYIKKNLIGALLFDGGNTAADRRLKRTARRRYTRRRNRILYLQEIFAEEMSKVDDSFFHRLEDSFLVEEDKRGSKYPIFATMQEEKDYHEKFPTIYHLRKELADKKEKADLRLVYLALAHIIKFRGHFLIEDDRFDVRNTDIQKQYQAFLEIFDTSFENNHLLSQNVDVEAILTDKISKSAKKDRILAQYPNQKSTGIFAEFLKLIVGNQADFKKHFNLEDKTPLQFAKDSYDEDLENLLGQIGDEFADLFSAAKKLYDSVLLSGILTVTDLSTKAPLSASMIQRYDEHREDLKQLKQFVKASLPEKYQEIFADSSKDGYAGYIEGKTNQEAFYKYLSKLLTKQEDSEYFLEKIKNEDFLRKQRTFDNGSIPHQVHLTELKAIIRRQSEYYPFLKENQDKIEKILTFRIPYYVGPLARGNSDFAWMTRKTDDSIRPWNFEDLVDKEKSAEAFIHRMTNNDLYLPEEKVLPKHSLIYEKFTVYNELTKVRYKNEQGETYFFDSNVKQEIFDGVFKEHRKVSKKQLLDFLAKEFEEFRIVDVTGLDKENKAFNASLGTYHDLKKILDKDFLDNPDNESILEDIVQTITLFEDREMIKKRLENYKDLFTESQLKKLYRRHYTGWGRLSAKLINGIRDRESQKTILDYLISDGRANRNFMQLINDDGLSFKSIISKAQSGSHSDNLKEVVGELAGSPAIKKGILQSLKIVDELVKVMGYEPEQIVVEMARENQTTNQGRRNSRQRYKLLEDGVKNLASDILKEYPTDNQALQNERLFLYYLQNGRDMYTGEALDIDNLSQYDIDHIVPQAFIKDDSIDNRVLVSSAKNRGKSDDVPSIDIVKARKAFWKKLLDAKLISQRKYDNLTKAERGGLTPDDKAGFIQRQLVETRQITKHVARILDERFNNKVDDNNKPIRKVKIVTLKSNLVSNFRKEFGFYKIREVNNYHHAHDAYLNAVVAKAILTKYPQLEPEFVYGDYPKYNSYKTRKATEKLFFYSNIMNFFKTKVTLADETVVVKDDIEVNNETGEIAWDKKKHFATVRKVLSYPQVNIVKKTEVQTGGFSKESILAHSNSDKLIPRKTKDIYLDPKKYGGFDSPIVAYSVLVLADIKKGKAQKLKTVKELIGITIMERERFEKNPSAFLESKGYLNIRTDKLIILPKYSLFELENGRRRLLASAGELQKGNELALPTQYMKFLYLASRYNESKGKPEEIEKKQEFVNQHVSYFDDILQLINDFSKRVILADANLEKINKLYSDNKDNTPVDELAKNIINLFTFTSLGAPAAFKFFDKSVDRKRYTSTKEVLDSTLIHQSITGLYETRIDLGKLGED

SEQ ID NO: 70 - protein, 1365 aa, Streptococcus agalactiae
MNKPYSIGLDIGTNSVGWSIITDDYKVPAKKMRVLGNTDKEYIKKNLIGALLFDGGNTAADRRLKRTARRRYTRRRNRILYLQEIFAEEMSKVDDSFFHRLEDSFLVEEDKRGSKYPIFATMQEEKYYHEKFPTIYHLRKELADKKEKADLRLIYLALAHIIKFRGHFLIEDDRFDVRNTDIQKQYQAFLEIFDTTFENNDLLSQNVDVEAILTDKISKSAKKDRILARYPNQKSTGIFAEFLKLIVGNQADFKKHFNLEDKTPLQFAKDSYDEDLENLLGQIGDEFADLFSAAKKLYDSVLLSGILTVTDLSTKAPLSASMIQRYDEHREDLKQLKQFVKASLPEKYQEIFADSSKDGYAGYIEGKTNQEAFYKYLSKLLTKQEGSEYLLEKIKNEDFLRKQRTFDNGSIPHQVHLTELRAIIRRQSEYYPFLKENLDRIEKILTFRIPYYVGPLAREKSDFAWMTRKTDDSIRPWNFEDLVDKEKSAEAFIHRMTNNDLYLPEEKVLPKHSLIYEKFTVYNELTKVRFLAEGFKDFQFLNRKQKETIFNSLFKEKRKVTEKDIISFLNKVDGYEGIAIKGIEKQFNASLSTYHDLKKILGKDFLDNTDNELILEDIVQTLTLFEDREMIRKRLDIYKDFFTESQLKKLYRRHYTGWGRLSAKLINGIRNKENQKTILDYLIDDGSANRNFMQLIKDAGLSFKPIIDKARTGSHSDNLKEVVGELAGSPAIKKGILQSLKIVDELVKVMGYEPEQIVVEMARENQTTAKGLSRLRQRLTTLRESLANLKSEKKPKYVKDQVENHHLSDDRLFLYYLQNGKDMYTDDELDIDNLSQYDIDLIIPQAFIKDDSIDNRVLVSSAKNRGKSDDVPSVEIVKDCKVFWKKLLDAKLMSQRKYDNLTKAERGGLTSDDKARFIQRQLVETRQITKHVARILDERFNNELDSKGRRIRKVKIVTLKSNLVSNFRKEFGFYKIREVNNYHHAHDAYLNAVVAKAILTKYPQLEPEFVYGDYPKYNSYKTRKATEKLFFYSNIMNFFKTKVTLADGTVVVKDDIEVNNDTGEIVWDKKKHFATVRKVLSYPQVNIVKKTEIQTGGFSKESILAHGNSDKLIPRKTKDIYLDPKKYGGFDSPIVAYSVLVVADIKKGKAQKLKTVTELLGITIMERSRFEKNPSAFLESKGYLNIRDDKLMILPKYSLFELENGRRRLLASADELQKGNELALPTQFMKFLYLASRYNELKGKPEEIEQKQEFVVQHVSYFDDILQIINDFSNRVILADANLEKINKLYQDNKENIPVDELANNIINLFTFTSLGAPAAFKFFDKIVDRKRYTSTKEVLNSTLIHQSITGLYETRIDLGKLGED

SEQ ID NO: 71 - protein, 1365 aa, Streptococcus agalactiae
MNKPYSIGLDIGTNSVGWSIITDDYKVPAKKMRVLGNTDKEYIKKNLIGALLFDGGNTASDRRLKRTARRRYTRRRNRILYLQEIFAEEMSKVDDSFFHRLEDSFLVEDDKRGSKYPIFATMQEEKDYHEKFPTIYHLRKELADKKEKADLRLFYLALAHIIKFRGHFLIEDDSFDVRNTDIQRQYQAFLEIFDTTFENNHLLSQNIDIEGILTDKISKSAKKDRILAQYPNQKSTGIFAEFLKLIVGNQADFKKHFNLEDKTPLQFAKDSYDEDLENLLGQIGDEFADLFSVAKKLYDSVLLSGILTVTDLSTKAPLSASMIQRYDEHREDLKQLKQFVKASLPEKYQEIFTDSSKDGYAGYIEGKTNQGAFYKYLSKLLTKQEGSEYFLEKIKNEDFLRKQRTFDNGSIPHQVHLTELKAIIRRQSEYYPFLKENLDRIEKILTFRIPYYVGPLAREKSDFAWMTRKTDDSIRPWNFEELVDKEASAEAFIHRMTNNDLYLPEEKVLPKHSLIYEKFTVYNELTKVRYKNEQGETYFFDSNIKQEIFDGVFKEHRKVSKKKLLDFLAKEYEEFRIVDVIGLDKENKAFNASLGTYHDLKKILDKDFLDNPDNESILEDIVQTLTLFEDREMIKKRLENYKDLFTESQLKKLYRRHYTGWGRLSAKLINGIRDKESQKTILDYLIDDGKSNRNFMQLIHDDGLSFKSIISKAQAGSHSDNLKEVVGELAGSPAIKKGILQSLKIVDELVKVMGYEPEQIVVEMARENQTTNQGRRNSRQRYKLLDDGVKNLASNILKEYPTDNQALQNERLFLYYLQNGRDMYTGKALDIDNLSQYDIDHIIPQAFIKDDSIDNRVLVSSAKNRGKSDDVPSLEIVKDCKVFWKKLLDAKLMSQRKYDNLTKAERGGLTSDDKARFIQRQLVETRQITKHVARILDERFNNELDSKGRRIRKVKIVTLKSNLVSNFRKEFGFYKIREVNNYHHAHDAYLNAVVAKAILTKYPQLEPEFVYGDYPKYNSYKTRKATEKLFFYSNIMNFFKTKVTLADGTVVVKDDIEVNNDTGEIVWDKKKHFATVRKVLSYPQVNIVKKTEIQTGGFSKESILAHGNSDKLIPRKTKDIYLDPKKYGGFDSPIVAYSVLVVADIKKGKAQKLKTVTELLGITIMERSRFEKNPSAFLESKGYLNIRDDKLMILPKYSLFELENGRRRLLASAGELQKGNELALPTQFMKFLYLASRYNELKGKPEEIEQKQEFVVQHVSYFDDILQIINDFSNRVILADANLEKINKLYQDNKENISVDELANNIINLFTFTSLGAPAAFKFFDKIVDRKRYTSTKEVLNSTLIHQSITGLYETRIDLGKLGED

SEQ ID NO: 72 - protein, 1365 aa, Streptococcus agalactiae
MNKPYSIGLDIGTNSVGWSIITDDYKVPAKKMRVLGNTDKEYIKKNLIGALLFDGGNTASDRRLKRTARRRYTRRRNRILYLQEIFAEEMSKVDDSFFHRLEDSFLVEDDKRGSKYPIFATMQEEKDYHEKFPTIYHLRKELADKKEKADLRLFYLALAHIIKFRGHFLIEDDSFDVRNTDIQRQYQAFLEIFDTTFENNHLLSQNIDVEGILTDKISKSAKKDRILAQYPNQKSTGIFAEFLKLIVGNQADFKKHFNLEDKTPLQFAKDSYDEDLENLLGQIGDEFADLFSVAKKLYDSVLLSGILTVTDLSTKAPLSASMIQRYDEHREDLKQLKQFVKASLPEKYQEIFTDSSKDGYAGYIEGKTNQGAFYKYLSKLLTKQEGSEYFLEKIKNEDFLRKQRTFDNGSIPHQVHLTELKAIIRRQSEYYPFLKENLDRIEKILTFRIPYYVGPLAREKSDFAWMTRKTDDSIRPWNFEELVDKEASAEAFIHRMTNNDLYLPEEKVLPKHSLIYEKFTVYNELTKVRYKNEQGETYFFDSNIKQEIFDGVFKEHRKVSKKKLLDFLAKEYEEFRIVDVIGLDKENKAFNASLGTYHDLKKILDKDFLDNPDNESILEDIVQTLTLFEDREMIKKRLENYKDLFTESQLKKLYRRHYTGWGRLSAKLINGIRDKESQKTILDYLIDDGKSNRNFMQLIHDDGLSFKSIISKAQAGSHSDNLKEVVGELAGSPAIKKGILQSLKIVDELVKVMGYEPEQIVVEMARENQTTNQGRRNSRQRYKLLDDGVKNLASNILKEYPTDNQALQNERLFLYYLQNGRDMYTGKALDIDNLSQYDIDHIIPQAFIKDDSIDNRVLVSSAKNRGKSDDVPSLEIVKDCKVFWKKLLDAKLMSQRKYDNLTKAERGGLTSDDKARFIQRQLVETRQITKHVARILDERFNNELDSKGRRIRKVKIVTLKSNLVSNFRKEFGFYKIREVNNYHHAHDAYLNAVVAKAILTKYPQLEPEFVYGDYPKYNSYKTRKATEKLFFYSNIMNFFKTKVTLADGTVVVKDDIEVNNDTGEIVWDKKKHFATVRKVLSYPQVNIVKKTEIQTGGFSKESILAHGNSDKLIPRKTKDIYLDPKKYGGFDSPIVAYSVLVVADIKKGKAQKLKTVTELLGITIMERSRFEKNPSAFLESKGYLNIRDDKLMILPKYSLFELENGRRRLLASAGELQKGNELALPTQFMKFLYLASRYNELKGKPEEIEQKQEFVVQHVSYFDDILQIINDFSNRVILADANLEKINKLYQDNKENISVDELANNIINLFTFTSLGAPAAFKFFDKIVDRKRYTSTKEVLNSTLIHQSITGLYETRIDLGKLGED

SEQ ID NO: 73 - protein, 1365 aa, Streptococcus agalactiae
MNKPYSIGLDIGTNSVGWSIITDDYKVPAKKMRVLGNTDKEYIKKNLIGALLFDGGNTAADRRLKRTARRRYTRRRNRILYLQEIFAEEMSKVDDSFFHRLEDSFLVEEDKRGSKYPIFATLQEEKDYHEKFPTIYHLRKELADKKEKADLRLIYIALAHIIKFRGHFLIEDDSFDVRNTDISKQYQDFLEIFNTTFENNDLLSQNVDVEAILTDKISKSAKKDRILAQYPNQKSTGIFAEFLKLIVGNQADFKKYFNLEDKTPLQFAKDSYDEDLENLLGQIGDEFADLFSAAKKLYDSVLLSGILTVIDLSTKAPLSASMIQRYDEHREDLKQLKQFVKASLPEKYQEIFADSSKDGYAGYIEGKTNQEAFYKYLSKLLTKQEDSENFLEKIKNEDFLRKQRTFDNGSIPHQVHLTELKAIIRRQSEYYPFLKENQDRIEKILTFRIPYYIGPLAREKSDFAWMTRKTDDSIRPWNFEDLVDKEKSAEAFIHRMTNNDFYLPEEKVLPKHSLIYEKFTVYNELTKVRYKNEQGETYFFDSNIKQEIFDGVFKEHRKVSKKKLLDFLAKEYEEFRIVDVIGLDKENKAFNASLGTYHDLEKILDKDFLDNPDNESILEDIVQTLTLFEDREMIKKRLENYKDLFTESQLKKLYRRHYTGWGRLSAKLINGIRDKESQKTILDYLIDDGRSNRNFMQLINDDGLSFKSIISKAQAGSHSDNLKEVVGELAGSPAIKKGILQSLKIVDELVKVMGYEPEQIVVEMARENQTTNQGRRNSRQRYKLLDDGVKNLASNILKEYPTDNQALQNERLFLYYLQNGRDMYTGEALDIDNLSQYDIDHIIPQAFIKDDSIDNRVLVSSAKNRGKSDDVPSLEIVKDCKVFWKKLLDAKLMSQRKYDNLTKAERGGLTSDDKARFIQRQLVETRQITKHVARILDERFNNELDSKGRRIRKVKIVTLKSNLVSNFRKEFGFYKIREVNNYHHAHDAYLNAVVAKAILTKYPQLEPEFVYGDYPKYNSYKTRKATEKLFFYSNIMNFFKTKVTLADGTVVVKDDIEVNNDTGEIVWDKKKHFATVRKVLSYPQNNIVKKTEIQTGGFSKESILAHGNSDKLIPRKTKDIYLDPKKYGGFDSPIVAYSVLVVADIKKGKAQKLKTVTELLGITIMERSRFEKNPSAFLESKGYLNIRADKLIILPKYSLFELENGRRRLLASAGELQKGNELALPTQFMKFLYLASRYNESKGKPEEIEKKQEFVNQHVSYFDDILQLINDFSKRVILADANLEKINKLYQDNKENISVDELANNIINLFTFTSLGAPAAFKFFDKIVDRKRYTSTKEVLNSTLIHQSITGLYETRIDLGKLGED

SEQ ID NO: 74 - protein, 1365 aa, Streptococcus agalactiae
MNKPYSIGLDIGTNSVGYSVVTDDYKVPAKKMRVLGNTDKEYIKKNLIGALLFDGGNTASDRRLKRTARRRYTRRRNRILYLQEIFAEEMSKVDDSFFHRLEDSFLVEDDKRGSKYPIFATMQEEKDYHEKFPTIYHLRKELADKKEKADLRLVYLALAHIIKFRGHFLIEDDSFDVRNTDIQRQYQAFLEIFDTTFENNHLLSQNIDVEGILTDKISKSAKKDRILAQYPNQKSTGIFAEFLKLIVGNQADFKKHFNLEDKTPLQFAKDSYDEDLENLLGQIGDEFADLFSVAKKLYDSVLLSGILTVTALSTKAPLSASMIQRYDEHREDLKQLKQFVKASLPEKYQEIFTDSSKDGYAGYIEGKTNQGAFYKYLSKLLTKQEGSEYFLEKIKNEDFLRKQRTFDNGSIPHQVHLTELKAIIRRQSEYYPFLKENLDRIEKILTFRIPYYVGPLAREKSDFAWMTRKTDDSIRPWNFEELVDKEASAEAFIHRMTNNDLYLPEEKVLPKHSLIYEKFTVYNELTKVRYKNEQGETYFFDSNIKQEIFDGVFKEHRKVSKKKLLDFLAKEYEEFRIVDVIGLDKENKAFNASLGTYHDLKKILDKDFLDNPDNESILEDIVQTLTLFEDREMIKKRLENYKDLFTESQLKKLYRRHYTGWGRLSAKLINGIRDKESQKTILDYLISDGRANRNFMQLIHDDGLSFKPIIDKAQAGSHSDNLKEVVGELAGSPAIKKGILQSLKIVDELVKVMGYEPEQVVVEMARENQTTNQGRRNTRQRYKLLEEGVKNLASNILKEYPTDNQALQNERLFLYYLQNGRDMYTGEALDIDNLSQYDIDHIVPQAFIKDDSIDNRVLVSSAKNRGKSDNVPSIDIVKARKAFWKKLLDAKLMSQRKYDNLTKAERGGLTSDDKARFIQRQLVETRQITKHVARILDERFNNELDSKGRRIRKVKIVTLKSNLVSNFRKEFGFYKIREVNDYHHAHDAYLNAVVAKAILTKYPQLEPEFVYGDYPKYNSYKTRKATEKLFFYSNIMNFFKTKVTLADGTVVVKDDIEVNNDTGEIVWDKKKHFATVRKVLSYPQVNIVKKTEIQTGGFSKESILAHGNSDKLIPRKTKDIYLDPKKYGGFDSPIVAYSVLVVADIKKGKAQKLKTVTELLGITIMERFRFEKNPSAFLESKGYLNIRDDKLMILPKYSLFELENGRRRLLASAGELQKGNELALPTQYMKFLYLASRYNELKGKPEEIEQKQEFVVQHVSYFDDILQIINDFSNRVILADANLEKINKLYQDNKENISVDELANNIINLFTFTSLGAPAAFKFFDKIVDRKRYTSTKEVLNSTLIHQSITGLYETRIDLGKLGED

SEQ ID NO: 75 - protein, 1365 aa, Streptococcus agalactiae
MNKPYSIGLDIGTNSVGWSIITDDYKVPAKKMRVLGNTDKEYIKKNLIGALLFDGGNTAADRRLKRTARRRYTRRRNRILYLQEIFAEEMSKVDDSFFHRLEDSFLVEEDKRGSKYPIFATLQEEKDYHEKFSTIYHLRKELADKKEKADLRLIYIALAHIIKFRGHFLIEDDSFDVRNTDISKQYQDFLEIFNTTFENNDLLSQNVDVEAILTDKISKSAKKDRILAQYPNQKSTGIFAEFLKLIVGNQADFKKYFNLEDKTPLQFAKDSYDEDLENLLGQIGDEFADLFSAAKKLYDSVLLSGILTVIDLSTKAPLSASMIQRYDEHREDLKQLKQFVKASLPEKYQEIFADSSKDGYAGYIEGKTNQEAFYKYLSKLLTKQEDSENFLEKIKNEDFLRKQRTFDNGSIPHQVHLTELKAIIRRQSEYYPFLKENQDRIEKILTFRIPYYIGPLAREKSDFAWMTRKTDDSIRPWNFEDLVDKEKSAEAFIHRMTNNDFYLPEEKVLPKHSLIYEKFTVYNELTKVRYKNEQGETYFFDSNIKQEIFDGVFKEHRKVSKKKLLDFLAKEYEEFRIVDVIGLDKENKAFNASLGTYHDLEKILDKDFLDNPDNESILEDIVQTLTLFEDREMIKKRLENYKDLFTESQLKKLYRRHYTGWGRLSAKLINGIRDKESQKTILDYLIDDGRSNRNFMQLINDDGLSFKSIISKAQAGSHSDNLKEVVGELAGSPAIKKGILQSLKIVDELVKVMGYEPEQIVVEMARENQTTNQGRRNSRQRYKLLDDGVKNLASNILKEYPTDNQALQNERLFLYYLQNGRDMYTGEALDIDNLSQYDIDHIIPQAFIKDDSIDNRVLVSSAKNRGKSDDVPSLEIVKDCKVFWKKLLDAKLMSQRKYDNLTKAERGGLTSDDKARFIQRQLVETRQITKHVARILDERFNNELDSKGRRIRKVKIVTLKSNLVSNFRKEFGFYKIREVNNYHHAHDAYLNAVVAKAILTKYPQLEPEFVYGDYPKYNSYKTRKATEKLFFYSNIMNFFKTKVTLADGTVVVKDDIEVNNDTGEIVWDKKKHFATVRKVLSYPQNNIVKKTEIQTGGFSKESILAHGNSDKLIPRKTKDIYLDPKKYGGFDSPIVAYSVLVAADIKKGKAQKLKTVTELLGITIMERSRFEKNPSAFLESKGYLNIRADKLIILPKYSLFELENGRRRLLASAGELQKGNELALPTQFMKFLYLASRYNESKGKPEEIEKKQEFVNQHVSYFDDILQLINDFSKRVILADANLEKINKLYQDNKENISVDELANNIINLFTFTSLGAPAAFKFFDKIVDRKRYTSTKEVLNSTLIHQSITGLYETRIDLGKLGED

SEQ ID NO: 76 - protein, 1365 aa, Streptococcus agalactiae
MNKPYSIGLDIGTNSVGWSIITDDYKVPAKKMRVLGNTDKEYIKKNLIGALLFDGGNTAADRRLKRTARRRYTRRRNRILYLQEIFAEEMSKVDDSFFHRLEDSFLVEEDKRGSKYPIFATLQEEKDYHEKFSTIYHLRKELADKKEKADLRLIYIALAHIIKFRGHFLIEDDSFDVRNTDISKQYQDFLEIFNTTFENNDLLSQNVDVEAILTDKISKSAKKDRILAQYPNQKSTGIFAEFLKLIVGNQADFKKYFNLEDKTPLQFAKDSYDEDLENLLGQIGDEFADLFSAAKKLYDSVLLSGILTVIDLSTKASLSDSMIQRYDEHREDLKQLKQFVKASLPEKYQEIFADSSKDGYAGYIEGKTNQEAFYKYLSKLLTKQEDSENFLEKIKNEDFLRKQRTFDNGSIPHQVHLTELKAIIRRQSEYYPFLKENQDRIEKILTFRIPYYIGPLAREKSDFAWMTRKTDDSIRPWNFEDLVDKEKSAEAFIHRMTNNDFYLPEEKVLPKHSLIYEKFTVYNELTKVRYKNEQGETYFFDSNIKQEIFDGVFKEHRKVSKKKLLDFLAKEYEEFRIVDVIGLDKENKAFNASLGTYHDLEKILDKDFLDNPDNESILEDIVQTLTLFEDREMIKKRLENYKDLFTESQLKKLYRRHYTGWGRLSAKLINGIRDKESQKTILDYLIDDGRSNRNFMQLINDDGLSFKSIISKAQAGSHSDNLKEVVGELAGSPAIKKGILQSLKIVDELVKVMGYEPEQIVVEMARENQTTNQGRRNSRQRYKLLDDGVKNLASNILKEYPTDNQALQNERLFLYYLQNGRDMYTGEALDIDNLSQYDIDHIIPQAFIKDDSIDNRVLVSSAKNRGKSDDVPSLEIVKDCKVFWKKLLDAKLMSQRKYDNLTKAERGGLTSDDKARFIQRQLVETRQITKHVARILDERFNNELDSKGRRIRKVKIVTLKSNLVSNFRKEFGFYKIREVNNYHHAHDAYLNAVVAKAILTKYPQLEPEFVYGDYPKYNSYKTRKATEKLFFYSNIMNFFKTKVTLADGTVVVKDDIEVNNDTGEIVWDKKKHFATVRKVLSYPQNNIVKKTEIQTGGFSKESILAHGNSDKLIPRKTKDIYLDPKKYGGFDSPIVAYSVLVVADIKKGKAQKLKTVTELLGITIMERSRFEKNPSAFLESKGYLNIRADKLIILPKYSLFELENGRRRLLASAGELQKGNELALPTQFMKFLYLASRYNESKGKPEEIEKKQEFVNQHVSYFDDILQLINDFSKRVILADANLEKINKLYQDNKENISVDELANNIINLFTFTSLGAPAAFKFFDKIVDRKRYTSTKEVLNSTLIHQSITGLYETRIDLGKLGED

SEQ ID NO: 77 - protein, 1365 aa, Streptococcus agalactiae
MNKPYSIGLDIGTNSVGWSIITDDYKVPAKKMRVLGNTDKEYIKKNLIGALLFDGGNTAADRRLKRTARRRYTRRRNRILYLQEIFAEEMSKVDDSFFHRLEDSFLVEEDKRGSKYPIFATLQEEKDYHEKFSTIYHLRKELADKKEKADLRLIYIALAHIIKFRGHFLIEDDSFDVRNTDISKQYQDFLEIFNTTFENNDLLSQNVDVEAILTDKISKSAKKDRILAQYPNQKSTGIFAEFLKLIVGNQADFKKYFNLEDKTPLQFAKDSYDEDLENLLGQIGDEFADLFSAAKKLYDSVLLSGILTVIDLSTKAPLSASMIQRYDEHREDLKQLKQFVKASLPEKYQEIFADSSKDGYAGYIEGKTNQEAFYKYLSKLLTKQEDSENFLEKIKNEDFLRKQRTFDNGSIPHQVHLTELKAIIRRQSEYYPFLKENQDRIEKILTFRIPYYIGPLAREKSDFAWMTRKTDDSIRPWNFEDLVDKEKSAEAFIHRMTNNDFYLPEEKVLPKHSLIYEKFTVYNELTKVRYKNEQGETYFFDSNIKQEIFDGVFKEHRKVSKKKLLDFLAKEYEEFRIVDVIGLDKENKAFNASLGTYHDLEKILDKDFLDNPDNESILEDIVQTLTLFEDREMIKKRLENYKDLFTESQLKKLYRRHYTGWGRLSAKLINGIRDKESQKTILDYLIDDGRSNRNFMQLINDDGLSFKSIISKAQAGSHSDNLKEVVGELAGSPAIKKGILQSLKIVDELVKVMGYEPEQIVVEMARENQTTNQGRRNSRQRYKLLDDGVKNLASNILKEYPTDNQALQNERLFLYYLQNGRDMYTGEALDIDNLSQYDIDHIIPQAFIKDDSIDNRVLVSSAKNRGKSDDVPSLEIVKDCKVFWKKLLDAKLMSQRKYDNLTKAERGGLTSDDKARFIQRQLVEIRQITKHVARILDERFNNELDSKGRRIRKVKIVTLKSNLVSNFRKEFGFYKIREVNNYHHAHDAYLNAVVAKAILTKYPQLEPEFVYGDYPKYNSYKTRKATEKLFFYSNIMNFFKTKVTLADGTVVVKDDIEVNNDTGEIVWDKKKHFATVRKVLSYPQNNIVKKTEIQTGGFSKESILAHGNSDKLIPRKTKDIYLDPKKYGGFDSPIVAYSVLVVADIKKGKAQKLKTVTELLGITIMERSRFEKNPSAFLESKGYLNIRADKLIILPKYSLFELENGRRRLLASAGELQKGNELALPTQFMKFLYLASRYNESKGKPEEIEKKQEFVNQHVSYFDDILQLINDFSKRVILADANLEKINKLYQDNKENISVDELANNIINLFTFTSLGAPAAFKFFDKIVDRKRYTSTKEVLNSTLIHQSITGLYETRIDLGKLGED

SEQ ID NO: 78 - protein, 1365 aa, Streptococcus agalactiae
MNKPYSIGLDIGTNSVGWSIITDDYKVPAKKMRVLGNTDKEYIKKNLIGALLFDGGNTAADRRLKRTARRRYTRRRNRILYLQEIFAEEMSKVDDSFFHRLEDSFLVEEDKRGSKYPIFATLQEEKDYHEKFSTIYHLRKELADKKEKADLRLIYIALAHIIKFRGHFLIEDDSFDVRNTDISKQYQDFLEIFNTTFENNDLLSQNVDVEAILTDKISKSAKKDRILAQYPNQKSTGIFAEFLKLIVGNQADFKKYFNLEDKTPLQFAKDSYDEDLENLLGQIGDEFADLFSAAKKLYDSVLLSGILTVIDLSTKAPLSASMIQRYDEHREDLKQLKQFVKASLPEKYQEIFADSSKDGYAGYIEGKTNQEAFYKYLSKLLTKQEDSENFLEKIKNEDFLRKQRTFDNGSIPHQVHLTELKAIIRRQSEYYPFLKENQDRIEKILTFRIPYYIGPLAREKSDFAWMTRKTDDSIRPWNFEDLVDKEKSAEAFIHRMTNNDFYLPEEKVLPKHSLIYEKFTVYNELTKVRYKNEQGETYFFDSNIKQEIFDGVFKEHRKVSKKKLLDFLAKEYEEFRIVDVIGLDKENKAFNASLGTYHDLEKILDKDFLDNPDNESILEDIVQTLTLFEDREMIKKRLENYKDLFTESQLKKLYRRHYTGWGRLSAKLINGIRDKESQKTILDYLIDDGRSNRNFMQLINDDGLSFKSIISKAQAGSHSDNLKEVVGELAGSPAIKKGILQSLKIVDELVKVMGYEPEQIVVEMARENQTTNQGRRNSRQRYKLLDDGVKNLASNILKEYPTDNQALQNERLFLYYLQNGRDMYTGEALDIDNLSQYDIDHIIPQAFIKDDSIDNRVLVSSAKNRGKSDDVPSLEIVKDCKVFWKKLLDAKLMSQRKYDNLTKAERGGLTSDDKARFIQRQLVETRQITKHVARILDERFNNELDSKGRRIRKVKIVTVKSNLVSNFRKEFGFYKIREVNNYHHAHDAYLNAVVAKAILTKYPQLEPEFVYGDYPKYNSYKTRKATEKLFFYSNIMNFFKTKVTLADGTVVVKDDIEVNNDTGEIVWDKKKHFATVRKVLSYPQNNIVKKTEIQTGGFSKESILAHGNSDKLIPRKTKDIYLDPKKYGGFDSPIVAYSVLVVADIKKGKAQKLKTVTELLGITIMERSRFEKNPSAFLESKGYLNIRADKLIILPKYSLFELENGRRRLLASAGELQKGNELALPTQFMKFLYLASRYNESKGKPEEIEKKQEFVNQHVSYFDDILQLINDFSKRVILADANLEKINKLYQDNKENISVDELANNIINLFTFTSLGAPAAFKFFDKIVDRKRYTSTKEVLNSTLIHQSITGLYETRIDLGKLGED

SEQ ID NO: 79 - protein, 1365 aa, Streptococcus agalactiae
MNKPYSIGLDIGTNSVGWSIITDDYKVPAKKMRVLGNTDKEYIKKNLIGALLFDGGNTAADRRLKRTARRRYTRRRNRILYLQEIFAEEMSKVDDSFFHRLEDSFLVEEDKRGSKYPIFATLQEEKDYHEKFSTIYHLRKELADKKEKADLRLIYIALAHIIKFRGHFLIEDDSFDVRNTDISKQYQDFLEIFNTTFENNDLLSQNVDVEAILTDKISKSAKKDRILAQYPNQKSTGIFAEFLKLIVGNQADFKKYFNLEDKTPLQFAKDSYDEDLENLLGQIGDEFADLFSAAKKLYDSVLLSGILTVIDLSTKAPLSASMIQRYDEHREDLKQLKQFVKASLPEKYQEIFADSSKDGYAGYIEGKTNQEAFYKYLSKLLTKQEDSENFLEKIKNEDFLRKQRTFDNGSIPHQVHLTELKAIIRRQSEYYPFLKENQDRIEKILTFRIPYYIGPLAREKSDFAWMTRKTDDSIRPWNFEDLVDKEKSAEAFIHRMTNNDFYLPEEKVLPKHSLIYEKFTVYNELTKVRYKNEQGETYFFDSNIKQEIFDGVFKEHRKVSKKKLLDFLAKEYEEFRIVDVIGLDKENKAFNASLGTYHDLEKILDKDFLDNPDNESILEDIVQTLTLFEDREMIKKRLENYKDLFTESQLKKLYRRHYTGWGRLSAKLINGIRDKESQKTILDYLIDDGRSNRNFMQLINDDGLSFKSIISKAQAGSHSDNLKEVVGELAGSPAIKKGILQSLKIVDELVKVMGYEPEQIVVEMARENQTTNQGRRNSRQRYKLLDDGVKNLASNILKEYPTDNQALQNERLFLYYLQNGRDMYTGEALDIDNLSQYDIDHIIPQAFIKDDSIDNRVLVSSAKNRGKSDDVPSLEIVKDCKVFWKKLLDAKLMSQRKYDNLTKAERGGLTSDDKARFIQRQLVETRQITKHVARILDELFNNELDSKGRRIRKVKIVTLKSNLVSNFRKEFGFYKIREVNNYHHAHDAYLNAVVAKAILTKYPQLEPEFVYGDYPKYNSYKTRKATEKLFFYSNIMNFFKTKVTLADGTVVVKDDIEVNNDTGEIVWDKKKHFATVRKVLSYPQNNIVKKTEIQTGGFSKESILAHGNSDKLIPRKTKDIYLDPKKYGGFDSPIVAYSVLVVADIKKGKAQKLKTVTELLGITIMERSRFEKNPSAFLESKGYLNIRADKLIILPKYSLFELENGRRRLLASAGELQKGNELALPTQFMKFLYLASRYNESKGKPEEIEKKQEFVNQHVSYFDDILQLINDFSKRVILADANLEKINKLYQDNKENISVDELANNIINLFTFTSLGAPAAFKFFDKIVDRKRYTSTKEVLNSTLIHQSITGLYETRIDLGKLGGD

SEQ ID NO: 80 - protein, 1365 aa, Streptococcus agalactiae; identical to SEQ ID NO: 49

SEQ ID NO: 81 - protein, 1365 aa, Streptococcus agalactiae
MNKPYSIGLDIGTNSVGYSVVTDDYKVPAKKMRVLGNTDKEYIKKNLIGALLFDGGNTASDRRLKRTARRRYTRRRNRILYLQEIFAEEMSKVDDSFFHRLEDSFLVEDDKRGSKYPIFATMQEEKDYHEKFPTIYHLRKELADKKEKANLRLVYLALAHIIKFRGHFLIEDDSFDVRNTDIQRQYQAFLEIFDTTFENNHLLSQNIDVEGILTDKISKSAKKDRILAQYPNQKSTGIFAEFLKLIVGNQADFKKHFNLEDKTPLQFAKDSYDEDLENLLGQIGDEFADLFSVAKKLYDSVLLSGILTVTDLSTKAPLSASMIQRYDEHREDLKQLKQFVKASLPEKYQEIFTDSSKDGYAGYIEGKTNQGAFYKYLSKLLTKQEGSEYFLEKIKNEDFLRKQRTFDNGSIPHQVHLTELKAIIRRQSEYYPFLKENLDRIEKILTFRIPYYVGPLAREKSDFAWMTRKTDDSIRPWNFEELVDKEASAEAFIHRMTNNDLYLPEEKVLPKHSLIYEKFTVYNELTKVRYKNEQGETYFFDSNIKQEIFDGVFKEHRKVSKKKLLDFLAKEYEEFRIVDVIGLDKENKAFNASLGTYHDLKKILDKDFLDNPDNESILEDIVQTLTLFEDREMIKKRLENYKDLFTESQLKKLYRRHYTGWGRLSAKLINGIRDKESQKTILDYLISDGRANRNFMQLIHDDGLSFKPIIDKAQAGSHSDNLKEVVGELAGSPAIKKGILQSLKIVDELVKVMGYEPEQVVVEMARENQTTNKGRRNTRQRYKLLEEGVKNLASNILKEYPTDNQALQNERLFLYYLQNGRDMYTGEALDIDNLSQYDIDHIVPQAFIKDDSIDNRVLVSSAKNRGKSDNVPSIDIVKARKAFWKKLLDAKLMSQRKYDNLTKAERGGLTSDDKARFIQRQLVETRQITKHVARILDERFNNELDSKGRRIRKVKIVTLKSNLVSNFRKEFGFYKIREVNDYHHAHDAYLNAVVAKAILTKYPQLEPEFVYGDYPKYNSYKTRKATEKLFFYSNIMNFFKTKVTLADGTVVVKDDIEVNNDTGEIVWDKKKHFATVRKVLSYPQVNIVKKTEIQTGGFSKESILAHGNSDKLIPRKTKDIYLDPKKYGGFDSPIVAYSVLVVADIKKGKAQKLKTVTELLGITIMERFRFEKNPSAFLESKGYLNIRDDKLMILPKYSLFELENGRRRLLASAGELQKGNELALPTQYMKFLYLASRYNELKGKPEEIEQKQEFVVQHVSYFDDILQIINDFSNRVILADANLEKINKLYQDNKENISVDELANNIINLFTFTSLGAPAAFKFFDKIVDRKRYTSTKEVLNSTLIHQSITGLYETRIDLGKLGED

SEQ ID NO: 82 - protein, 1365 aa, Streptococcus agalactiae
MNKPYSIGLDIGTNSVGWSIITDDYKVPAKKMRVLGNTDKEYIKKNLIGALLFDGRNTAADRRLKRTARRRYTRRRNRILYLQEIFAEEMSKVDDSFFHRLEDSFLVEEDKRGSKYPIFATLQEEKDYHEKFSTIYHLRKELADKKEKADLRLIYIALAHIIKFRGHFLIEDDSFDVRNTDISKQYQDFLEIFNTTFENNDLLSQNVDVEAILTDKISKSAKKDRILAQYPNQKSTGIFAEFLKLIVGNQADFKKYFNLEDKTPLQFAKDSYDEDLENLLGQIGDEFADLFSAAKKLYDSVLLSGILTVIDLSTKAPLSASMIQRYDEHREDLKQLKQFVKASLPEKYQEIFADSSKDGYAGYIEGKTNQEAFYKYLSKLLTKQEDSENFLEKIKNEDFLRKQRTFDNGSIPHQVHLTELKAIIRRQSEYYPFLKENQDRIEKILTFRIPYYIGPLAREKSDFAWMTRKTDDSIRPWNFEDLVDKEKSAEAFIHRMTNNDFYLPEEKVLPKHSLIYEKFTVYNELTKVRYKNEQGETYFFDSNIKQEIFDGVFKEHRKVSKKKLLDFLAKEYEEFRIVDVIGLDKENKAFNASLGTYHDLEKILDKDFLDNPDNESILEDIVQTLTLFEDREMIKKRLENYKDLFTESQLKKLYRRHYTGWGRLSAKLINGIRDKESQKTILDYLIDDGRSNRNFMQLINDDGLSFKSIISKAQAGSHSDNLKEVVGELAGSPAIKKGILQSLKIVDELVKVMGYEPEQIVVEMARENQTTNQGRRNSRQRYKLLDDGVKNLASNILKEYPTDNQALQNERLFLYYLQNGRDMYTGEALDIDNLSQYDIDHIIPQAFIKDDSIDNRVLVSSAKNRGKSDDVPSLEIVKDCKVFWKKLLDAKLMSQRKYDNLTKAERGGLTSDDKARFIQRQLVETRQITKHVARILDERFNNELDSKGRRIRKVKIVTLKSNLVSNFRKEFGFYKIREVNNYHHAHDAYLNAVVAKAILTKYPQLEPEFVYGDYPKYNSYKTRKATEKLFFYSNIMNFFKTKVTLADGTVVVKDDIEVNNDTGEIVWDKKKHFATVRKVLSYPQNNIVKKTEIQTGGFSKESILAHGNSDKLIPRKTKDIYLDPKKYGGFDSPIVAYSVLVVADIKKGKAQKLKTVTELLGITIMERSRFEKNPSAFLESKGYLNIRADKLIILPKYSLFELENGRRRLLASAGELQKGNELALPTQFMKFLYLASRYNESKGKPEEIEKKQEFVNQHVSYFDDILQLINDFSKRVILADANLEKINKLYQDNKENISVDELANNIINLFTFTSLGAPAAFKFFDKIVDRKRYTSTKEVLNSTLIHQSITGLYETRIDLGKLGED

SEQ ID NO: 83 - protein, 1365 aa, Streptococcus agalactiae
MNKPYSIGLDIGTNSVGWSIITDDYKVPAKKMRVLGNTDKEYIKKNLIGALLFDGGNTAADRRLKRTARRRYTRRRNRILYLQEIFAEEMSKVDDSFFHRLEDSFLVEEDKRGSKYPIFATMQEEKYYHEKFPTIYHLRKELADKKEKADLRLIYLALAHIIKFRGHFLIEDDSFDVRNTDIQKQYQAFLEIFDTTFENNDLLSQNVDVEAILTDKISKSAKKDRILARYPNQKSTGIFAEFLKLIVGNQADFKKHFNLEDKTPLQFAKDSYDEDLENLLGQIGDEFADLFSAAKKLYDSVLLSGILTVTDLSTKAPLSASMIQRYDEHREDLKQLKQFVKASLPEKYQEIFADSSKDGYAGYIEGKTNQEAFYKYLSKLLTKQEGSEYLLEKIKNEDFLRKQRTFDNGSIPHQVHLTELRAIIRRQSEYYPFLKENLDRIEKILTFRIPYYVGPLAREKSDFAWMTRKTDDSIRPWNFEDLVDKEKSAEAFIHRMTNNDLYLPEEKVLPKHSLIYEKFTVYNELTKVRFLAEGFKDFQFLNRKQKETIFNSLFKEKRKVTEKDIISFLNKVDGYEGIAIKGIEKQFNASLSTYHDLKKILGKDFLDNTDNELILEDIVQTLTLFEDREMIRKRLDIYKDFFTESQLKKLYRRHYTGWGRLSAKLINGIRNKENQKTILDYLIDDGSANRNFMQLIKDAGLSFKPIIDKARTGSHSDNLKEVVGELAGSPAIKKGILQSLKIVDELVKVMGYEPEQIVVEMARENQTTAKGLSRSRQRLTTLRESLANLKSEKKPKYVKDQVENHHLSDDRLFLYYLQNGKDMYTDDELDIDNLSQYDIDHIIPQAFIKDDSIDNRVLVSSAKNRGKSDDVPSVEIVKDCKVFWKKLLDAKLMSQRKYDNLTKAERGGLTSDDKARFIQRQLVETRQITKHVARILDERFNNELDSKGRRIRKVKIVTLKSNLVSNFRKEFGFYKIREVNNYHHAHDAYLNAVVAKAILTKYPQLEPEFVYGDYPKYNSYKTRKATEKLFFYSNIMNFFKTKVTLADGTVVVKDDIEVNNDTGEIVWDKKKHFATVRKVLSYPQVNIVKKTEIQTGGFSKESILAHGNSDKLIPRKTKDIYLDPKKYGGFDSPIVAYSVLVVADIKKGKAQKLKTVTELLGITIMERSRFEKNPSAFLESKGYLNIRDDKLMILPKYSLFELENGRRRLLASAGELQKGNELALPTQFMKFLYLASRYNELKGKPEEIEQKQEFVVQHVSYFDDILQIINDFSNRVILADANLEKINKLYQDNKENIPVDELANNIINLFTFTSLGAPAAFKFFDKIVDRKRYTSTKEVLNSTLIHKSITGLYETRIDLGKLGED

SEQ ID NO: 84 - protein, 1365 aa, Streptococcus agalactiae
MNKPYSIGLDIGTNSVGWSIITDDYKVPAKKMRVLGNTDKEYIKKNLIGALLFDGGNTAADRRLKRTARRRYTRRRNRILYLQEIFAEEMSKVDDSFFHRLEDSFLVEEDKRGSKYPIFATLQEEKDYHEKFSTIYHLRKELADKKEKADLRLIYIALAHIIKFRGHFLIEDDSFDVRNTDISKQYQDFLEIFNTTFENNDLLSQNVDVEAILTDKISKSAKKDRILAQYPNQKSTGIFAEFLKLIVGNQADFKKYFNLEDKTPLQFAKDSYDEDLENLLGQIGDEFADLFSAAKKLYDSVLLSGILTVIDLSTKAPLSASMIQRYDEHREDLKQLKQFVKASLPEKYQEIFADSSKDGYAGYIEGKTNQEAFYKYLSKLLTKQEDSENFLEKIKNEDFLRKQRTFDNGSIPHQVHLTELKAIIRRQSEYYPFLKENQDRIEKILTFRIPYYIGPLAREKSDFAWMTRKTDDSIRPWNFEDLVDKEKSAEAFIHRMTNNDFYLPEEKVLPKHSLIYEKFTVYNELTKVRYKNEQGETYFFDSNIKQEIFDGVFKEHRKVSKKKLLDFLAKEYEEFRIVDVIGLDKENKAFNASLGTYHDLEKILDKDFLDNPDNESILEDIVQTLTLFEDREMIKKRLENYKDLFTESQLKKLYRRHYTGWGRLSAKLINGIRDKESQKTILDYLIDDGRSNRNFMQLINDDGLSFKSIISKAQAGSHSDNLKEVVGELAGSPAIKKGILQSLKIVDELVKVMGYEPEQIVVEMARENQTTNQGRRNSRQRYKLLDDGVKNLASNILKEYPTDNQALQNERLFLYYLQNGRDMYTGEALDIDNLSQYDIDHIIPQAFIKDDSIDNRVLVSSAKNRGKSDDVPSLEIVKDCKVFWKKLLDAKLMSQRKYDNLTKAERGGLTSDDKARFIQRQLVETRQITKHVARILDERFNNELDSKGRRIRKVKIVTLKSNLVSNFRKEFGFYKIREVNNYHHAHDAYLNAVVAKAILTKYPQLEPEFVYGDYPKYNSYKTRKATEKLFFYSNIMNFFKTKVTLADGTVVIKDDIEVNNDTGEIVWDKKKHFATVRKVLSYPQNNIVKKTEIQTGGFSKESILAHGNSDKLIPRKTKDIYLDPKKYGGFDSPIVAYSVLVVADIKKGKAQKLKTVTELLGITIMERSRFEKNPSAFLESKGYLNIRADKLIILPKYSLFELENGRRRLLASAGELQKGNELALPTQFMKFLYLASRYNESKGKPEEIEKKQEFVNQHVSYFDDILQLINDFSKRVILADANLEKINKLYQDNKENISVDELANNIINLFTFTSLGAPAAFKFFDKIVDRKRYTSTKEVLNSTLIHQSITGLYETRIDLGKLGED

SEQ ID NO: 85 - protein, 1365 aa, Streptococcus agalactiae
MNKPYSIGLDIGTNSVGWSIITDDYKVPAKKMRVLGNTDKEYIKKNLIGALLFDGGNTAADRRLKRTARRRYTRRRNRILYLQEIFAEEMSKVDDSFFHRLEDSFLVEEDKRGSKYPIFATLQEEKDYHEKFSTIYHLRKELADKKEKADLRLIYIALAHIIKFRGHFLIEDDSFDVRNTDISKQYQDFLEIFNTTFENNDLLSQNVDVEAILTDKISKSAKKDRILAQYPNQKSTGIFAEFLKLIVGNQADFKKYFNLEDKTPLQFAKDSYDEDLENLLGQIGDEFADLFSAAKKLYDSVLLSGILTVIDLSTKAPLSASMIQRYDEHREDLKQLKQFVKASLPEKYQEIFADSSKDGYAGYIEGKTNQEAFYKYLSKLLTKQEDSENFLEKIKNEDFLRKQRTFDNGSIPHQVHLTELKAIIRRQSEYYPFLKENQDRIEKILTFRIPYYIGPLAREKSDFAWMTRKTDDSIRPWNFEDLVDKEKSAEAFIHRMTNNDFYLPEEKVLPKHSLIYEKFTVYNELTKVRYKNEQGETYFFDSNIKQEIFDGVFKEHRKVSKKKLLDFLAKEYEEFRIVDVIGLDKENKAFNASLGTYHDLEKILDKDFLDNPDNESILEDIVQTLTLFEDREMIKKRLENYKDLFTESQLKKLYRRHYTGWGRLSAKLINGIRDKESQKTILDYLIDDGRSNRNFMQLINDDGLSFKSIISKAQAGSHSDNLKEVVGELAGSPAIKKGILQSLKIVDELVKVMGYEPEQIVVEMARENQTTNQGRRNSRQRYKLLDDGVKNLASNILKEYPTDNQALQNERLFLYYLQNGRDMYTGEALDIDNLSQYDIDHIIPQAFIKDDSIDNRVLVSSAKNRGKSDDVPSLEIVKDCKVFWKKLLDAKLMSQRKYDNLTKAERGGLTSDDKARFIQRQLVETRQITKHVASILDERFNNELDSKGRRIRKVKIVTLKSNLVSNFRKEFGFYKIREVNNYHHAHDAYLNAVVAKAILTKYPQLEPEFVYGDYPKYNSYKTRKATEKLFFYSNIMNFFKTKVTLADGTVVVKDDIEVNNDTGEIVWDKKKHFATVRKVLSYPQNNIVKKTEIQTGGFSKESILAHGNSDKLIPRKTKDIYLDPKKYGGFDSPIVAYSVLVVADIKKGKAQKLKTVTELLGITIMERSRFEKNPSAFLESKGYLNIRADKLIILPKYSLFELENGRRRLLASAGELQKGNELALPTQFMKFLYLASRYNESKGKPEEIEKKQEFVNQHVSYFDDILQLINDFSKRVILADANLEKINKLYQDNKENISVDELANNIINLFTFTSLGAPAAFKFFDKIVDRKRYTSTKEVLNSTLIHQSITGLYETRIDLGKLGED

SEQ ID NO: 86 - protein, 1365 aa, Streptococcus agalactiae
MNKPYSIGLDIGTNSVGYSVVTDDYKVPAKKMRVLGNTDKEYIKKNLIGALLFDGGNTASDRRLKRTARRRYTRRRNRILYLQEIFAEEMSKVDDSFFHRLEDSFLVEDDKRGSKYPIFATMQEEKDYHEKFPTIYHLRKELADKKEKANLRLVYLALAHIIKFRGHFLIEDDSFDVRNTDIQRQYQAFLEIFDTTFENNHLLSQNIDVEGILTDKISKSAKKDRILAQYPNQKSTGIFAEFLKLIVGNQADFKKHFNLEDKTPLQFAKDSYDEDLENLLGQIGDEFADLFSVAKKLYDSVLLSGILTVTDLSTKAPLSASMIQRYDEHREDLKQLKQFVKASLPEKYQEIFTDSSKDGYAGYIESKTNQGAFYKYLSKLLTKQEGSEYFLEKIKNEDFLRKQRTFDNGSIPHQVHLTELKAIIRRQSEYYPFLKENLDRIEKILTFRIPYYVGPLAREKSDFAWMTRKTDDSIRPWNFEELVDKEASAEAFIHRMTNNDLYLPEEKVLPKHSLIYEKFTVYNELTKVRYKNEQGETYFFDSNIKQEIFDGVFKEHRKVSKKKLLDFLAKEYEEFRIVDVIGLDKENKAFNASLGTYHDLKKILDKDFLDNPDNESILEDIVQTLTLFEDREMIKKRLENYKDLFTESQLKKLYRRHYTGWGRLSAKLINGIRDKESQKTILDYLISDGRANRNFMQLIHDDGLSFKPIIDKAQAGSHSDNLKEVVGELAGSPAIKKGILQSLKIVDELVKVMGYEPEQVVVEMARENQTTNQGRRNTRQRYKLLEEGVKNLASNILKEYPTDNQALQNERLFLYYLQNGRDMYTGEALDIDNLSQYDIDHIVPQAFIKDDSIDNRVLVSSAKNRGKSDNVPSIDIVKARKAFWKKLLDAKLMSQRKYDNLTKAERGGLTSDDKARFIQRQLVETRQITKHVARILDERFNNELDSKGRRIRKVKIVTLKSNLVSNFRKEFGFYKIREVNDYHHAHDAYLNAVVAKAILTKYPQLEPEFVYGDYPKYNSYKTRKATEKLFFYSNIMNFFKTKVTLADGTVVVKDDIEVNNDTGEIVWDKKKHFATVRKVLSYPQVNIVKKTEIQTGGFSKESILAHGNSDKLIPRKTKDIYLDPKKYGGFDSPIVAYSVLVVADIKKGKAQKLKTVTELLGITIMERFRFEKNPSAFLESKGYLNIRDDKLMILPKYSLFELENGRRRLLASAGELQKGNELALPTQYMKFLYLASRYNELKGKPEEIEQKQEFVVQHVSYFDDILQIINDFSNRVILADANLEKINKLYQDNKENISVDELANNIINLFTFTSLGAPAAFKFFDKIVDRKRYTSTKEVLNSTLIHQSITGLYETRIDLGKLGED

SEQ ID NO: 87 - protein, 1365 aa, Streptococcus agalactiae
MNKPYSIGLDIGTNSVGWSIITDDYKVPAKKMRVLGNTDKEYIKKNLIGALLFDGGNTAADRRLKRTARRRYTRRRNRILYLQEIFAEEMSKVDDSFFHRLEDSFLVEEDKRGSKYPIFATLQEEKDYHEKFSTIYHLRKELADKKEKADLRLIYIALAHIIKFRGHFLIEDDSFDVRNTDISKQYQDFLEIFNTTFENNDLLSQNVDVEAILTDKISKSAKKDRILAQYPNQKSTGIFAEFLKLIVGNQADFKKYFNLEDKTPLQFAKDSYDEDLENLLGQIGDEFADLFSAAKKLYDSVLLSGILTVIDLSTKAPLSASMIQRYDEHREDLKQLKQFVKASLPEKYQEIFADSSKDGYAGYIEGKTNQEAFYKYLSKLLTKQEDSENFLEKIKNEDFLRKQRTFDNGSIPHQVHLTELKAIIRRQSEYYPFLKENQDRIEKILTFRIPYYIGPLAREKSDFAWMTRKTDDSIRPWNFEDLVDKEKSAEAFIHRMTNNDFYLPEEKVLPKHSLIYEKFTVYNELTKVRYKNEQGETYFFDSNIKQEIFDGVFKEHRKVSKKKLLDFLAKEYEEFRIVDVIGLDKENKAFNASLGTYHDLEKILDKDFLDNPDNESILEDIVQTLTLFEDREMIKKRLENYKDLFTESQLKKLYRRHYTGWGRLSAKLINGIRDKESQKTILDYLIDDGRSNRNFMQLINDDGLSFKSIISKAQAGSHSDNLKEVVGELAGSPAIKKGILQSLKIVDELVKVMGYEPEQIVVEMARENQTTNQGRRNSRQRYKLLDDGVKNLASNILKEYPTDNQALQNERLFLYYLQNGRDMYTGEALDIDNLSQYDIDHIIPQAFIKDDSIDNRVLVSSAKNRGKSDDVPSLEIVKDCKVFWKKLLDAKLMSQRKYDNLTKAERGGLTSDDKARFIQRQLVETRQITKHVARILDERFNNELDSKGRRIRKVKIVTLKSNLVSNFRKEFGFYKIREVNNYHHAHDAYLNAVVAKAILTKYPQLEPEFVYGDYPKYNSYKTRKATEKLFFYSNIMNFFKTKVTLADGTVVVKDDIEVNNDTGEIVWDKKKHFATVRKVLSYPQNNIVKKTEIQTGGFSKESILAHGNSDKLIPRKTKDIYLDPKKYGGFDSPIVAYSVLVVADIKKGKAQKLKTVTELLGITIMERSRFEKNLSAFLESKGYLNIRADKLIILPKYSLFELENGRRRLLASAGELQKGNELALPTQFMKFLYLASRYNESKGKPEEIEKKQEFVNQHVSYFDDILQLINDFSKRVILADANLEKINKLYQDNKENISVDELANNIINLFTFTSLGAPAAFKFFDKIIDRKRYTSTKEVLNSTLIHQSITGLYETRIDLGKLGED

SEQ ID NO: 88 - protein, 1365 aa, Streptococcus agalactiae
MNKPYSIGLDIGTNSVGWSIITDDYKVPAKKMRVLGNTDKEYIKKNLIGALLFDGGNTAADRRLKRTARRRYTRRRNRILYLQEIFAEEMSKVDDSFFHRLEDSFLVEEDKRGSKYPIFATLQEEKDYHEKFSTIYHLRKELADKKEKADLRLIYIALAHIIKFRGHFLIEDDSFDVRNTDISKQYQDFLEIFNTTFENNDLLSQNVDVEAILTDKISKSAKKDRILAQYPNQKSTGIFAEFLKLIVGNQADFKKYFNLEDKTPLQFAKDSYDEDLENLLGQIGDEFADLFSAAKKLYDSVLLSGILTVIDLSTKAPLSASMIQRYDEHREDLKQLKQFVKASLPEKYQEIFADSSKDGYAGYIEGKTNQEAFYKYLSKLLTKQEDSENFLEKIKNEDFLRKQRTFDNGSIPHQVHLTELKDIIRRQSEYYPFLKENQDRIEKILTFRIPYYIGPLAREKSDFAWMTRKTDDSIRPWNFEDLVDKEKSAEAFIHRMTNNDFYLPEEKVLPKHSLIYEKFTVYNELTKVRYKNEQGETYFFDSNIKQEIFDGVFKEHRKVSKKKLLDFLAKEYEEFRIVDVIGLDKENKAFNASLGTYHDLEKILDKDFLDNPDNESILEDIVQTLTLFEDREMIKKRLENYKDLFTESQLKKLYRRHYTGWGRLSAKLINGIRDKESQKTILDYLIDDGRSNRNFMQLINDDGLSFKSIISKAQAGSHSDNLKEVVGELAGSPAIKKGILQSLKIVDELVKVMGYEPEQIVVEMARENQTTNQGRRNSRQRYKLLDDGVKNLASNILKEYPTDNQALQNERLFLYYLQNGRDMYTGEALDIDNLSQYDIDHIIPQAFIKDDSIDNRVLVSSAKNRGKSDDVPSLEIVKDCKVFWKKLLDAKLMSQRKYDNLTKAERGGLTSDDKARFIQRQLVETRQITKHVARILDERFNNELDSKGRRIRKVKIVTLKSNLVSNFRKEFGFYKIREVNNYHHAHDAYLNAVVAKAILTKYPQLEPEFVYGDYPKYNSYKTRKATEKLFFYSNIMNFFKTKVTLADGTVVVKDDIEVNNDTGEIVWDKKKHFATVRKVLSYPQNNIVKKTEIQTGGFSKESILAHGNSDKLIPRKTKDIYLDPKKYGGFDSPIVAYSVLVVADIKKGKAQKLKTVTELLGITIMERSRFEKNPSAFLESKGYLNIRADKLIILPKYSLFELENGRRRLLASAGELQKGNELALPTQFMKFLYLASRYNESKGKPEEIEKKQEFVNQHVSYFDDILQLINDFSKRVILADANLEKINKLYQDNKENISVDELANNIINLFTFTSLGAPAAFKFFDKIVDRKRYTSTKEVLNSTLIHQSITGLYETRIDLGKLGED

SEQ ID NO: 89 - protein, 1365 aa, Streptococcus agalactiae
  source 1..1365: note = 138P
MNKPYSIGLDIGTNSVGWSIITDDYKVPAKKMRVLGNTDKEYIKKNLIGALLFDGGNTAADRRLKRTARRRYTRRRNRILYLQEIFAEEMSKVDDSFFHRLEDSFLVEEDKRGSKYPIFATMQEEKDYHEKFPTIYHLRKELADKKEKADLRLVYLALAHIIKFRGHFLIEDDRFDVRNTDIQKQYQAFLEIFDTSFENNHLLSQNVDVEAILTDKISKSAKKDRILAQYPNQKSTGIFAEFLKLIVGNQADFKKHFNLEDKTPLQFAKDSYDEDLENLLGQIGDEFADLFSAAKKLYDSVLLSGILTVTDLSTKAPLSASMIQRYDEHREDLKQLKQFVKASLPEKYQEIFADSSKDGYAGYIEGKTNQEAFYKYLSKLLTKQEDSEYFLEKIKNEDFLRKQRTFDNGSIPHQVHLTELKAIIRRQSEYYPFLKENQDKIEKILTFRIPYYVGPLARGNSDFAWMTRKTDDSIRPWNFEDLVDKEKSAEAFIHRMTNNDLYLPEEKVLPKHSLIYEKFTVYNELTKVRYKNEQGETYFFDSNVKQEIFDGVFKEHRKVSKKQLLDFLAKEFEEFRIVDVTGLDKENKAFNASLGTYHDLKKILDKDFLDNPDNESILEDIVQTITLFEDREMIKKRLENYKDLFTESQLKKLYRRHYTGWGRLSAKLINGIRDRESQKIILDYLISDGRANRNFMQLINDDGLSFKSIISKAQSGSHSDNLKEVVGELAGSPAIKKGILQSLKIVDELVKVMGYEPEQIVVEMARENQTTNQGRRNSRQRYKLLEDGVKNLASDILKEYPTDNQALQNERLFLYYLQNGRDMYTGEALDIDSLSQYDIDHIVPQAFIKDDSIDNRVLVSSAKNRGKSDDVPSIDIVKARKAFWKKLLDAKLISQRKYDNLTKAERGGLTPDDKAGFIQRQLVETRQITKHVARILDERFNNKVDDNNKPIRKVKIVTLKSNLVSNFRKEFGFYKIREVNNYHHAHDAYLNAVVAKAILTKYPQLEPEFVYGDYPKYNSYKTRKATEKLFFYSNIMNFFKTKVTLADETVVVKDDIEVNNETGEIAWDKKKHFATVRKVLSYPQVNIVKKTEVQTGGFSKESILAHSNSDKLIPRKTKDIYLDPKKYGGFDSPIVAYSVLVLADIKKGKAQKLKTVKELIGITIMERERFEKNPSAFLESKGYLNIRTDKLIILPKYSLFELENGRRRLLASAGELQKGNELALPTQYMKFLYLASRYNESKGKPEEIEKKQEFVNQHVSYFDDILQLINDFSKRVILADANLEKINKLYSDNKDNTPVDELAKNIINLFTFTSLGAPAAFKFFDKSVDRKRYTSTKEVLDSTLIHQSITGLYETRIDLGKLGED

SEQ ID NO: 90 - protein, 1365 aa, Streptococcus agalactiae
  VARIANT 9: note = X can be any naturally occurring amino acid
  source 1..1365: note = H36B
MNKPYSIGXDIGTNSVGWSIITDDYKVPAKKMRVLGNTDKEYIKKNLIGALLFDGGNTAADRRLKRTARRRYTRRRNRILYLQEIFAEEMSKVDDSFFHRLEDSFLVEEDKRGSKYPIFATLQEEKDYHEKFSTIYHLRKELADKKEKADLRLIYIALAHIIKFRGHFLIEDDSFDVRNTDISKQYQDFLEIFNTTFENNDLLSQNVDVEAILTDKISKSAKKDRILAQYPNQKSTGIFAEFLKLIVGNQADFKKYFNLEDKTPLQFAKDSYDEDLENLLGQIGDEFADLFSAAKKLYDSVLLSGILTVIDLSTKAPLSASMIQRYDEHREDLKQLKQFVKASLPEKYQEIFADSSKDGYAGYIEGKTNQEAFYKYLSKLLTKQEDSENFLEKIKNEDFLRKQRTFDNGSIPHQVHLTELKAIIRRQSEYYPFLKENQDRIEKILTFRIPYYIGPLAREKSDFAWMTRKTDDSIRPWNFEDLVDKEKSAEAFIHRMTNNDFYLPEEKVLPKHSLIYEKFTVYNELTKVRYKNEQGETYFFDSNIKQEIFDGVFKEHRKVSKKKLLDFLAKEYEEFRIVDVIGLDKENKAFNASLGTYHDLEKILDKDFLDNPDNESILEDIVQTLTLFEDREMIKKRLENYKDLFTESQLKKLYRRHYTGWGRLSAKLINGIRDKESQKTILDYLIDDGRSNRNFMQLINDDGLSFKSIISKAQAGSHSDNLKEVVGELAGSPAIKKGILQSLKIVDELVKVMGYEPEQIVVEMARENQTTNQGRRNSRQRYKLLDDGVKNLASNILKEYPTDNQALQNERLFLYYLQNGRDMYTGEALDIDNLSQYDIDHIIPQAFIKDDSIDNRVLVSSAKNRGKSDDVPSLEIVKDCKVFWKKLLDAKLMSQRKYDNLTKAERGGLTSDDKARFIQRQLVETRQITKHVARILDERFNNELDSKGRRIRKVKIVTLKSNLVSNFRKEFGFYKIREVNNYHHAHDAYLNAVVAKAILTKYPQLEPEFVYGDYPKYNSYKTRKATEKLFFYSNIMNFFKTKVTLADGTVVVKDDIEVNNDTGEIVWDKKKHFATVRKVLSYPQNNIVKKTEIQTGGFSKESILAHGNSDKLIPRKTKDIYLDPKKYGGFDSPIVAYSVLVVADIKKGKAQKLKTVTELLGITIMERSRFEKNPSAFLESKGYLNIRADKLIILPKYSLFELENGRRRLLASAGELQKGNELALPTQFMKFLYLASRYNESKGKPEEIEKKQEFVNQHVSYFDDILQLINDFSKRVILADANLEKINKLYQDNKENISVDELANNIINLFTFTSLGAPAAFKFFDKIVDRKRYTSTKEVLNSTLIHQSITGLYETRIDLGKLGED

SEQ ID NO: 91 - protein, 1365 aa, Streptococcus agalactiae
  source 1..1365: note = ILRI112
MNKPYSIGLDIGTNSVGWSIITDDYKVPAKKMRVLGNTDKEYIKKNLIGALLFDGGNTAADRRLKRIARRRYTRRRNRILYLQEIFAEKMSKVDDSFFHRLEDSFLVEEDKRGSKYPIFATLQEEKDYHEKFPTIYHLRKELADKKEKADLRLVYLALAHIIKFRGHFLIEDDRFDVRNTDIQKQYQAFLEIFDTTFENNHLLSQNVDVEAILTDKISKSAKKDRILAQYPDQKSTGIFAEFLKLIVGNQADFKKHFNLEDKTPLQFAKDSYDEDLENLLGQIGDEFADLFSAAKKLYDSVLLSGILTVTDLSTKAPLSASMIQRYDEHREDLKQLKQFVKASLPEKYQEIFADSSKDGYAGYIEGKTNQEAFYKYLSKLLTKQEGSEYLLEKIKNEDFLRKQRTFDNGSIPHQVHLTELRAIIRRQSEYYPFLKENLDRIEKILTFRIPYYVGPLAREKSDFAWMTRKTDDSIRPWNFEELVDKEASAEAFIHCMTNNDLYLPEEKVLPKHSLIYEKFTVYNELTKVRYKNEQGETYFFDSNIKQEIFDGVFKEYRKVSKKQLLDFLAKEFEEFRIVDVTGLDKENKAFNASLGTYHDLEKILGKDFLDNPDNESILEDIVQTLTLFEDREMIKKRLDIYKDFFTESQLKKLYRRHYTGWGRLSAKLINGIRNKENQKTILDYLIDDGSANRNFMQLIKDAGLSFKSIISKAQSGSHSDNLKEVVSELAGSPAIKKGILQSLKIVDELVKVMGYKPEQIVVEMARENQTTNQGRRNSRQRYKLLDDGVRNLASNILKEYPTDNQALQNERLFLYYLQNGRDMYTEKALDIDNLSQYDIDHIIPQAFIKDDSIDNRVLVSSAKNRGKSDDVPSLEIVKDCKVFWKKLLDAKLMSQRKYDNLTKAERGGLTSDDKARFIQRQLVETRQITKHVARILDERFNNELDSKGRRIRKVKIVTLKSNLVSNFRKEFGFYKIREVNDYHHAHDAYLNAVVAKAILTKYPQLEPEFVYGDYPKYNSYKTRKATEKLFFYSNIMNFFKTKVTLADGTVVVKDDIEVNNDTGEIVWDKKKHFATVRKVLSYPQNNIVKKTEIQTGGFSKESILAHGNSDKLIPRKTKDIYLDPKKYGGFDSPIVAYSVLVVADIKKGKAQKLKTVTELLGITIMERSRFEKNPSAFLESKGYLNIRTDKLIILPKYSLFELENGRRRLLASAGELQKGNELALPTQFMKFLYLASRYNESKGKPEEIEKKQEFVNQHVSYFDDILQIINDFSNRVILADANLEKINKLYQDNKENISVDELANNIINLFTFTSLGAPAAFKFFDKIVDRKRYTSTKEVLNSTLIHQSITGLYETRIDLGKLGED

SEQ ID NO: 92 - protein, 1351 aa, Streptococcus anginosus
MNQKYSIGLDIGTNSVGWAVITDDYKVPAKKMKVLGNTDKQSIKKNLLGALLFDSGETAEATRLKRTARRRYTRRRNRLRYLQEIFAEEMMQVDESFFQRLDDSFLVDEDKRGERHPIFGNIAAEVKYHDEFPTIYHLRKHLADISQKADLRLVYLALAHMIKFRGHFLIEGQLKAENTNVQALFKDFVEVYDKTVEESHLSEITVDALSILTEKVSKSRRLENLIAHYPAEKKNTLFGNLIALFLGLQPNFKTNFQLSEDAKLQFSKDTYEEDLEGLLGEVGDEYADLFASAKNLYDAILLSGILTVDDNSTKAPLSASMVKRYEEHQKDLKKFEDFIKVNALDQYNAIFKDKNKKGYAGYIESGVKQDEFYKYLKGILLQINGSGDFLDKIDREDFLRKQRTFDNGSIPHQIHLQEMHAILRRQGEHYPFLKENQDKIEKILTFRIPYYVGPLARKGSRFAWAEYKADEKITPWNFDDILDKEKSAEKFITRMTLNDLYLPEEKVLPKHSLLYETFTVYNELTKVKYVNEQGEAKFFDANMKQEIFDHVFKENRKVTKDKLLNYLNKEFEEFRIVNLTGLDKENKVFNSSLGTYHDLRKILNKSFLDNKENAQIIEDIIQTLTLFEDREMIRQRLQKYSDIFTKAQLKKLERRHYTGWGRLSYKLINGIRNKENKKTILDYLIDDGYANRNFMQLINDDALSFKEEIAKAQIIGDVDDIANVVHDLPGSPAIKKGILQSVKIVDELVKVMGHNPANIIIEMARENQTTDRGRRNSQQRLKLLQDSLKPVNIKNVENQQLQNDRLFLYYIQNGKDMYTGETLDINNLSQYDIDHIIPQAYIKDDSFDNRVLTSSSENRGKSDNVPSIEVVCARKADWMRLRKAGLISQRKFDNLTKAERGGLTENDKAGFIKRQLVETRQITKHVAQVLDARFNAKHDENKKVIRDVKIITLKSNLVSQFRKDFKFYKVREINDYHHAHDAYLNAVIGTALLKKYPKLASEFVYGEFKKYDVSDKEIGKATAKYFFYSNLMNFFKKEVKFADGTVVERPDIETSEDGEIAWNKQTDFKIVRKVLSYPQVNIVKKTEVQTHGLDRPSPKPKPDSSENLVGVKRNLDPKKYGGYAGISNSYAVLVKAIIEKGVKKKETMVLEFQGISILDRITFEKDKRAFLLGKGYKDIKKIIELPKYSLFELKDGSRRMLASRGEIHKGNELFVPQKFTTLLYHAKRINNPINKDHIEYVKKHRDDFKELLNYVLEFNEKYVGATKNGERLKEAVADFDSKSNEEICTSFLGLFELTSLGSASDFEFLGVKIPRYRDYTPSSLLKDSTLIHQSITGLYETRIDLSKLGED

SEQ ID NO: 93 - protein, 1341 aa, Streptococcus anginosus
MKKEYSIGLDIGTNSVGWAVITDDYKVPAKKMKVLGNTDKQSIKKNLLGALLFDSGETAEATRLKRTARRRYTRRKNRLRYLQEIFTEEMNKVDENFFQRLDDSFLVEEDKQGSKYPIFGTLKEEKEYHKKFKTIYHLREELANSKEKADLRLVYLALAHMIKFRGHFLYEGDLKAENTDVQALFKDFVEEYDKTIEESHLSEITVDALSILTEKVSKSSRLENLIAHYPTEKKNTLFGNLIALSLGLQPNFKTNFQLSEDAKLQFSKDTYEEDLEELLGEIGDEYADLFASAKNLYDAILLSGILAVDDNTTKAPLSASMVKRYEEHQKDLKKLKDFIKVNAPDQYNAIFKDKNKKGYAGYIESGVEQDEFYKYLKGILLKINGSGDFLDKIDCEDFLRKQRTFDNGSIPHQIHLQEMHAILRRQGEHYPFLKENQDKIEKILTFRIPYYVGPLARKGSRFAWAEYKADEKITPWNFDDILDKEKSAEKFITRMTLNDLYLPEEKVLPKHSPLYETFTVYNELTKVKYVNEQGEAKFFDTNMKQEIFDHVFKENRKVTKDKLLNYLNKEFEEFRIVNLTGLDKENKAFNSSLGTYHDLRKILDKSFLDDKANEKTIEDIIQTLTLFEDREMIRQRLQKYSDIFTKAQLKKLERRHYTGWGRLSYKLINGIRNKENKKTILDYLIDDGYANRNFMQLINDDALSFKEEIARAQIIGDVDDIANVVHDLPGSPAIKKGILQSVKIVDELVKVMGHNPANIIIEMARENQTTDKGRRNSQQRLKLLQDSLKPVNIKNVENQQLQNDRLFLYYIQNGKDMYTGETLDINNLSQYDIDHIIPQAFIKDNSLDNRVLTRSDKNRGKSDDVPSIEVVHEMKSFWSKLLSVKLITQRKFDNLTKAERGGLTEEDKAGFIKRQLVETRQITKHVAQILDERFNTEFDGAQRRIRNVKIITLKSNLVSNFRKEFELYKVREINDYHHAHDAYLNAVVGNALLLKYPQLEPEFVYGEYPKYNSYRSRKSATEKFLFYSNILRFFKKEDIQTNEDGEIAWNKEKHIKILRKVLSYPQVNIVKKTEEQTGGFSKESILPKGESDKLIPRKTKNSYWNPKKYGGFDSPVVAYSILVFADVEKGKSKKLRKVQDMVGITIMEKKRFEKNPVDFLEQRGYRNVRLEKIIKLPKYSLFELENKRRRLLASARELQKGNELVIPQRFTTLLYHSYQIEKNYEPEHREYVEKHKDEFKELLEYISVFSRKYVLADNNLTKIEMLFSKNKDAEVSSLAKSFISLLTFTAFGAPAAFNFFGENIDRKRYTSVTECLNATLIHQSITGLYETRIDLSKLGED

SEQ ID NO: 94 - protein, 1341 aa, Streptococcus anginosus
MKKEYSIGLDIGTNSVGWAVITDDYKVPAKKMKVLGNTDKQSIKKNLLGALLFDSGETAEATRLKRTARRRYTRRRNRLRYLQEIFAEEMMQVDESFFQRLDDSFLVEEDKRGSRYPIFGNIAAEVKYHDDFPTIYHLRKHLVDISQKADLRLVYLALAHMIKFRGHFLIEGQLKAENTNVQALFKDFVEVYDKTVEESHLSEMTVDALSILTEKVSKSRRLENLVECYPTEKKNTLFGNLIALSLGLQPNFKTNFQLSEDAKLQFSKDTYEEDLEGLLGEIGDEYADLFASAKNLYDAILLSGILAVDDNTTKAPLSASMVKRYEEHQKDLKKLKDFIKVNAPAQYDDIFKDETKNGYAGYIENGVKQDEFYKYLKNTLSKIDGSDYFLDKIDREDFLRKQRTFDNGSIPHQIHLQEMHAILRRQGEHYPFLKENQDKIEKILTFRIPYYVGPLARKGSRFAWAEYKADEKITPWNFDDILDKEKSAEKFITRMTLNDLYLPEEKVLPKHSPLYETFTVYNELTKVKYVNEQGEAKFFDTNMKQEIFDHVFKENRKVTKDKLLNYLNKEFEEFRIVNLTGLDKENKAFNASLGTYHDLRKILDKSFLDDKVNEKIIEDIIQTLTLFEDREMIRQRLQKYSDIFTTQQLKKLERRHYTGWGRLSYKLINGIRNKENKKTILDYLIDDGYANRNFMQLINDDALSFKEEIARAQIIGDVDDIANVVHDLPGSPAIKKGILQSVKIVDELVKVMGHNPANIIIEMARENQTTDKGRRNSQQRLKLLQDSLKPVNIKNVENQQLQNDRLFLYYIQNGKDMYTGETLDINNLSQYDIDHIIPQAFIKDNSLDNRVLTRSDKNRGKSDDVPSIEVVHEMKSFWSKLLSVKLITQRKFDNLTKAERGGLTEEDKAGFIKRQLVETRQITKHVAQILDERFNTEFDGAQRRIRNVKIITLKSNLVSNFRKEFELYKVREINDYHHAHDAYLNAVVGNALLLKYPQLEPEFVYGEYPKYNSYRSRKSATEKFLFYSNILRFFKKEDIQTNEDGEIAWNKEKHIKILRKVLSYPQVNIVKKTEEQTGGFSKESILPKGESDKLIPRKTKNSYWNPKKYGGFDSPVVAYSILVFADVEKGKSKKLRKVQDMVGITIMEKKRFEKHPVDFLEQRGYRNVRLEKIIKLPKYSLFELENKRRRLLASARELQKGNELVIPQRFTTLLYHSYRIEKDYEPEHREYVEKHKDEFKELLEYISVFSRKYVLADNNLTKIEMLFSKNKDAEVSSLAKSFISLLTFTAFGAPAAFNFFGENIDRKRYTSVTECLNATLIHQSITGLYETRIDLSKLGED

SEQ ID NO: 95 - protein, 1341 aa, Streptococcus anginosus; identical to SEQ ID NO: 93
  source 1..1341: note = T5

SEQ ID NO: 96 - protein, 1360 aa, Streptococcus caballi
MTKKNYSIGLDIGTNSVGWAVITDDYKVPAKKMKVLGNTDKKYIKKNLLGALLFDSGETAEATRLKRTARRRYTRRKNRLRYLQDIFTEEMAKVDDSFFQRLDESFLTDNDKNFDSHPIFGNKAEEDAYHQKFPTIYHLRKHLADSTEKADLRLVYLALAHMIKFRGHFLIEGELNAENTDVQKLFTDFVGVYDRTFDDSHLSEITVDAASILTEKISKSRRLENLINNYPKEKKNTLFGNLIALALGLQPNFKTNFKLSEDAKLQFSKDTYEEDLEELLGKIGDDYADLFTSSKNLYDAILLSGILTVDDNSTKAPLSASMIKRYVEHHEDLEKLKEFIKANKSELYHDIFKDKTQNGYAGYIENGVKQDEFYKYLKGILTKINGSDYFLDKIEREDFLRKQRTFDNGSIPHQIHLQEMHAILRRQGDYYPFLKENQEEIEKILTFRIPYYVGPLARKDSRFAWAEYRSDEKITPWNFDKVIDKEKSAEKFITRMTLNDLYLPEEKVLPKHSHVYETFAVYNELTKVKYVNEQGKDSFFDSNMKQEIFDHVFKENRKVTKEKLLNYLDKEFPEYRIQDLVGLDKENKSFNASLGTYHDLKKILDKSFLDDKVNEEVIEDIIKTLTLFEDREMIQQRLQKYSDIFTKQQLKKLERRHYTGWGRLSYKLINGIRNKENNKTILDYLIDDGSANRNFMQLINDDALSFKQIIQEAQVVGDVDDIETVVHDLPGSPAIKKGILQSVKIVDELIKVMGDNPDNIVIEMARENQTTNRGRSQSQQRLKKLQNSLKPSYIEDKVENSHLQNDQLFLYYIQNGKDMYTGDELDIDHLSDYDIDHIIPQAFIKDDSIDNRVLTSSAKNRGKSDDVPSLGIVRARKAEWVRLYKSGLISKRKFDNLTKAERGGLTEADKAGFIKRQLVETRQITKHVAQILDARFNTERDENDKVIRDVKVITLKSNLVSQFRKEFKFYKVREINDYHHAHDAYLNAVVGTALLKKYPKLAPEFVYGEYKKYDVSSDDHSEMGKATAKYFFYSNLMNFFKRVIRYSNGKVIVRPVVEYSKDTGEIAWNKRTDFEKVRKVLSYPQVNIVKKVETQTGGFSKESILPKGDSDKLIPRKTKKVLWEPKKYGGFDSPTVAYSVLVVADVEKGKTKKLKTVKELVGISIMERSFFEKNPVEFLKNKGYQNVQEDKLMKLPKYSLFEFEGGRRRLLASATELQKGNEIMLSAHLVALLYHAHRIGNFNSAEHLKYVSEHKKEFEEVLSCVENFANVYVDVEKNLSKIRAAADSMDNFSIEEISDSFINLLTLTALGAPADFNFLGEKIPRKRYNSTKECLNATLIHQSITGLYETRIDLSKLGEE

SEQ ID NO: 97 - protein, 1355 aa, Streptococcus canis
MEKKYSIGLDIGTNSVGWAVITDDYKVPSKKFKVLGNTNRKSIKKNLMGALLFDSGETAEATRLKRTARRRYTRRKNRIRYLQEIFANEMAKLDDSFFQRLEESFLVEEDKKNERHPIFGNLADEVAYHRNYPTIYHLRKKLADSPEKADLRLIYLALAHIIKFRGHFLIEGKLNAENSDVAKLFYQLIQTYNQLFEESLDEIEVDAKGILSARLSKSKRLEKLIAVFPNEKKNGLFGNIIALALGLTPNFKSNFDLTEDAKLQLSKDTYDDDLDELLGQIGDQYADLFSAAKNLSDAILLSDILRSNSEVTKAPLSASMVKRYDEHHQDLALLKTLVRQQFPEKYAEIFKDDTKNGYAGYVGIGATQEEFYKFIKPILEKMDGAEELLAKLNRDDLLRKQRTFDNGSIPHQIHLKELHAILRRQEEFYPFLKENREKIEKILTFRIPYYVGPLARGNSRFAWLTRKSEEAITPWNFEEVVDKGASAQSFIERMTNFDEQLPNKKVLPKHSLLYEYFTVYNELTKVKYVTERMRKPEFLSGEQKKAIVDLLFKTNRKVTVKQLKEDYFKKIECFDSVEIIGVEDRFNASLGTYHDLLKIIKDKDFLDNEENEDILEDIVLTLTLFEDREMIEERLKTYAHLFDDKVMKQLKRRHYTGWGRLSRKMINGIRDKQSGKTILDFLKDGFSNRNFMQLIHDDSLTFKEEIEKAQVSGQGDSLHEQIADLAGSPAIKKGILQTVKIVDELVKVMGHKPENIVIEMARENQTTTKGLQQSRERKKRIEEGIKELESQILKENPVENTQLQNEKLYLYYLQNGRDMYVDQELDINRLSDYDVDHIVPQSFIKDDSIDNKVLTRSVENRGKSDNVPSEEVVKKMKNYWRQLLNAKLITQRKFDNLTKAERGGLSEADKAGFIKRQLVETRQITKHVARILDSRMNTKRDKNDKPIREVKVITLKSKLVSDFRKDFQLYKVRDINNYHHAHDAYLNAVVGTALIKKYPKLESEFVYGDYKVYDVSEQEIGKATAKRFFYSNIMNFFKTEVKLANGEIRKRPLIETNGETGEVVWNKEKDFATVRKVLAMPQVNIVKKTEVQTGGFSKESILSKRESAKLIPRKKGWDTRKYGGFGSPTVAYSILVVAKVEKGKAKKLKSVKVLVGITIMEKGSYEKDPIGFLEAKGYKDIKKELIFKLPKYSLFELENGRRRMLASELQKANELVLPQHLVRLLYYTQNISATTGSNNLGYIEQHREEFKEIFEKIIDFSEKYILKNKVNSNLKSSFDEQFAVSDSILLSNSFVSLLKYTSFGASGGFTFLDLDVKQGRLRYQTVTEVLDATLIYQSITGLYETRTDLSQLGGD

SEQ ID NO: 98 - protein, 1341 aa, Streptococcus constellatus
MGKPYSIGLDIGTNSVGWAVVTDDYKVPAKKMKVLGNTDKQSIKKNLLGALLFDSGETAEATRLKRTARRRYTRRKNRLRYLQEIFTGEMNKVDENFFQRLDDSFLVDEDKRGEHHPIFGNIAAEVKYHDDFPTIYHLRRHLADTSKKADLRLVYLALAHMIKFRGHFLYEGDLKAENTDVQALFKDFVEEYDKTIEESHLSEITVDALSILTEKVSKSSRLENLIAHYPTEKKNTLFGNLIALSLDLHPNFKTNFQLSEDAKLQFSKDTYEEDLEGFLGEVGDEYADLFASAKNLYDAILLSGILTVDDNSTKAPLSASMVKRYEEHQKDLKKLKDFIKVNAPDQYNAIFKDKNKKGYASYIESGVKQDEFYKYLKGILLKINGSGDFLDKIDREDFLRKQRTFDNGSIPHQIHLQEMHAILRRQGEHYPFLKENQDKIEKILTFRIPYYVGPLARKGSRFAWAEYKADEKITPWNFDDILDKEKSAEKFITRMTLNDLYLPEEKVLPKHSPLYEAFTVYNELTKVKYVNEQGEAKFFDTNMKQEIFDHVFKENRKVTKDKLLNYLNKEFEEFRIVNLTGLDKENKAFNSSLGTYHDLRKILDKSFLDDKANEKTIEDIIQTLTLFEDREMIRQRLQKYSDIFTKAQLKKLERRHYTGWGRLSYKLINGIRNKENKKTILDYLIDDGYANRNFMQLINDDALSFKEEIARAQIIDDVDDIANVVHDLPGSPAIKKGILQSVKIVDELVKVMGHNPANIIIEMARENQTTDKGRRNSQQRLKLLQDSLKPVNIKNVENQQLQNDRLFLYYIQNGKDMYTGETLDINNLSQYDIDHIIPQAFIKDNSLDNRVLTRSDKNRGKSDDVPSIEVVHEMKSFWSKLLSVKLITQRKFDNLTKAERGGLTEEDKAGFIKRQLVETRQITKHVAQILDERFNTEFDGNKRRIRNVKIITLKSNLVSNFRKEFELYKVREINDYHHAHDAYLNAVVGNALLLKYPQLEPEFVYGEYPKYNSYRSRKSATEKFLFYSNILRFFKKEDIQTNEDGEIAWNKEKHIKILRKVLSYPQVNIVKKTEEQTGGFSKESILPKGESDKLIPRKTKNSYWDPKKYGGFDSPVVAYSILVFADVEKGKSKKLRKVQDMVGITIMEKKRFEKNPVDFLEQRGYRNVRLEKIIKLPKYSLFELENKRRRLLASAKELQKGNELVIPQRFTTLLYHSYRIEKDYEPEHREYVEKHKDEFKELLEYISVFSRKYVLADNNLTKIEMLFSKNKDAEVSSLAKSFISLLTFTAFGAPAAFNFFGENIDRKRYTSVTECLNATLIHQSITGLYETRIDLSKLGED

SEQ ID NO: 99 - protein, 1355 aa, Streptococcus constellatus
MTQKYSIGLDIGTNSVGWAIVTDDYKVPAKKMKILGNTNKQYIKKNLLGALLFDSGETAKATRLKRTARRRYTRRKNRLRYLQEIFIEEMNKVDENFFQRLDDSFLVTEDKRGSKYPIFGTLKEEKEYYKEFETIYHLRKRLADSTGKVDLRLVYLALAHMIKFRGHFLIEGQLKAENTDVQTLFNDFVEVYDKTIEESHLAEITVDALSILTEKVSKSRRLENLVKCYPTEKKNTLFGNLIALSLGLQPNFKTNFQLSEDAKLQFSKDTYEEDLEELLGKIGDDYADLFTSAKNLYDTILLSGILAVDDNSTKALLSASMIKRYEEHQKDLKKLKDFIKVNAPAQYDDIFKDETKNGYAGYIENGVKQDEFYKYLKNTLSKIDGSGYFLDKIEREDFLRKQRTFDNGSIPHQIHLQEMHAILRRQGEHYPFLKENQDKIEKILTFRIPYYVGPLVRKGSRFAWAEYKADEKITPWNFDDILDKEKSAEKFITRMTLNDLYLPEEKVLPKHSLLYEIFTVYNELTKVKYVNEQGEAKFFDANMKQEIFDHVFKENPKVTKDKLLNYLDKEFDEFRIVDLTGLDKENKAFNASLGTYHDLRKILDKSFLDDKANEKTIEDIIQTLTLFEDREMIRQRLQKYSDIFTKAQLKKLERRHYTGWGRLSYKLINGIRNKENNKTILEYLVDDGYANRNFMQLINDDTLPFKQIIKDAQAIDDVDDIELIVHDLPGSPAIKKGILQSIKIVDELVKVMGYNPDNIVIEMARENQTTTKGRRNSQQRLKLLQDSLTPVSIKNVENQQLQNDRLFLYYIQNGKDMYTGEELDIHHLSDYDIDHIIPQAFIKDDSIDNRVLTSSAKNRGKSDNVPNLEVVCDRKADWIRLREAGLISQRKFDNLTKAERGGLTENDKAGFIHRQLVETRQITKHVAQILDARFNPKRDDNKKVIRDVKIITLKSNLVSQFRRDFKLYKVREINDYHHAHDAYLNAVVGTALLKKYPKLTSEFVYGEYKKYDVSDNDEIGKATAKYFFYSNLMNFFKTEVKFADGTVVERPDIETSEDGEIAWNKQTDFKIVRKVLSYPQVNIVKKVEKQTGRFSKESILPKGDSDKLIARKTKENYWDTKKYGGFDSPTVAYSVLVVADIKKGKAKKLKTVKELVGISIMERPFFEKNPIMFLESKGYRNIQKDKLIKLPKYSLFEFEGGRRRLLASAVELQKGNEMVLPQYLNNLLYHAHRIDNSDNSEHLKYITEHKEEFGKLLSYIENFAKSYVDVDKNLEKIQLAVEKIDSFSVKEISNSFIHLLTLTALGAPADFNFLGEKIPRKRYTSTKECLNATLIHQSITGLYETQTDLSKLGED

SEQ ID NO: 100 - protein, 1356 aa, Streptococcus dysgalactiae
MDKKYSIGLDIGTNSVGWAVITDDYKVPSKKFKVLGNTDRHSIKKNLIGALLFDSGETAEATRLKRTARRRYTRRKNRIRYLQEIFSSEMSKVDDSFFHRLEESFLVEEDKKHERHPIFGNIVDEVAYHEKYPTIYHLRKKLADSTDKADLRLIYLALAHMIKFRGHFLIEGDLNPDNSDMDKLFIQLVQTYNQLFEENINASRVDAKAILSARLSKSRRLENLIAQLPGEKRNGLFGNLIALSLGLTPNFKSNFDLAEDAKLQLSKDTYDDDLDNLLAQIGDQYADLFLAAKNLSDAILLSDILRVNSEITKAPLSASMIKRYDEHHQDLTLLKALVRQQLPEKYKEIFFDQSKNGYAGYIDGGASQEEFYKFIKPILEKMDGTEELLAKLNREDLLRKQRTFDNGSIPHQIHLGELHAILRRQEDFYPFLKDNREKIEKILTFRIPYYVGPLARGNSRFAWMTRKSEETITPWNFEEVVDKGASAQSFIERMTNFDKNLPNEKVLPKHSLLYEYFTVYNELTKVKYVTEGMRKPEFLSGKQKEAIVDLLFKTNRKVTVKQLKEDYFKKIECFDSVEISGVEDRFNASLGTYHDLLKIIKDKDFLDNEENEDILEDIVLTLTLFEDKEMIEERLKKYANLFDDKVMKQLKRRHYTGWGRLSRKLINGIRDKQSGKTILDFLKDGFANRNFMQLINDDSLTFKEAIQKAQVSGQGHSLHEQIANLAGSPAIKKGILQSVKVVDELVKVMGHKPENIVIEMARENQTTQKGQKNSRERMKRIEEGIKELGSQILKEHPVENTQLQNEKLYLYYLQNGRDMYVDQELDINRLSDYDVDHIVPQSFIKDDSIDNKILTRSDKNRGKSDNVPSEEVVKKMKNYWRQLLNAKLITQRKFDNLTKAERGGLSELDKAGFIKRQLVETRQITKHVAQILDSRMNTKYDENDKLIREVKVITLKSKLVSDFRKDFQFYKVREINNYHHAHDAYLNAVVGTALIKKYTKLESEFVYGDYKVYDVSEQEIGKATAKRFFYSNIMNFFKTEITLANGEIRKRPLIETNEETGEIVWDKGRDFATVRKVLSMPQVNIVKKTEVQTGALTNESIYARGSFDKLISRKHRFESSKYGGFGSPTVTYSVLVVAKSKVQDGKVKKIKTGKELIGMTLLDKLVFEKNPLKFIEDKGYGNVQIDKCIKLPKYSLFEFENGTRRMLASRGDLQKANEMFLPAKLVTLLYHAHKIESSKELEHEAYILDHYNDLYQLLSYIERFASLYVDVEKNISKVKELFSNIESYSISEICSSVINLLTLTASGAPADFKFLGTTIPRKRYGSPQSILSSTLIHQSITGLYETRIDLSQLGGD

SEQ ID NO: 101 - protein, 1356 aa, Streptococcus dysgalactiae
MDKKYSIGLDIGTNSVGWAVITDDYKVPSKKFKVLGNTDRHSIKKNLIGALLFDSGETAEATRLKRTARRRYTRRKNRIRYLQEIFSSEMSKVDDSFFHRLEESFLVEEDKKHERHPIFGNIVDEVAYHEKYPTIYHLRKKLADSTDKADLRLIYLALAHMIKFRGHFLIEGDLNPDNSDVDKLFIQLVQTYNQLFEEKINASGVDAKAILSARLSKSKRLENLIAQLPGEKKNGLFGNLIALSLGLTPNFKSNFDLAEDAKLQLSKDTYDDDLDNLLAQIGNQYADLFLAAKNLSDAILLSDILRVNSEITKAPLSASMIKRYDEHHQDLTLLKALVRQQLPEKYKEIFFDQSKNGYAGYIDGGASQEEFYKFIKPILEKMDGTEELLAKLNREDLLRKQRTFDNGSIPHQIHLGELHAILRRQEDFYPFLKDNREKIEKILTFRIPYYVGPLARGNSRFAWMTRKSEETITPWNFEEVVDKGASAQSFIERMTNFDKNLPNEKVLPKHSLLYEYFTVYNELTKVKYVTEGMRKPEFLSGKQKEAIVDLLFKTNRKVTVKQLKEDYFKKIECFDSVEISGVEDRFNASLGTYHDLLKIIKDKDFLDNEENEDILEDIVLTLTLFEDKEMIEERLKKYANLFDDKVMKQLKRRHYTGWGRLSRKLINGIRDKQSGKTILDFLKDGFANRNFMQLINDDSLTFKEAIQKAQVSGQGHSLHEQIANLAGSPAIKKGILQSVKVVDELVKVMGHKPENIVIEMARENQTTQKGQKNSRERMKRIEEGIKELGSQILKEHPVENTQLQNEKLYLYYLQNGRDMYVDQELDINRLSDYDVDHIVPQSFIKDDSIDNKVLTRSDKNRGKSDNVPSEEVVKKMKNYWRQLLNAKLITQRKFDNLTKAERGGLSELDKAGFIKRQLVETRQITKHVAQILDSRMNTKYDENDKLIREVKVITLKSKLVSDFRKDFQFYKVREINNYHHAHDAYLNAVVGTALIKKYPKLESEFVYGDYKVYDVSEQEIGKATAKRFFYSNIMNFFKTEITLANGEIRKRPLIETNEETGEIVWDKGRDFATVRKVLSMPQVNIVKKTEVQTGALTNESIYARGSFDKLISRKHRFESSKYGGFGSPTVTYSVLVVAKSKVQDGKVKKIKTGKELIGITLLDKLVFEKNPLKFIEDKGYGNVQIDKCIKLPKYSLFEFENGTRRMLASRGDLQKANEMFLPAKLVTLLYHAHKIESSKELEHEAYILDHYNDLYQLLSYIERFASLYVDVEKNISKVKELFSNIESYSISEICSSVINLLTLTASGAPADFKFLGTTIPRKRYGSPQSILSSTLIHQSITGLYETRIDLSQLGGD

SEQ ID NO: 102 - protein, 1356 aa, Streptococcus dysgalactiae
MDKKYSIGLDIGTNSVGWAVITDDYKVPSKKFKVLGNTDRHSIKKNLIGALLFDSGETAEATRLKRTARRRYTRRKNRIRYLQEIFSSEMSKVDDSFFHRLEESFLVEEDKKHERHPIFGNIVDEVAYHEKYPTIYHLRKKLADSTDKADLRLIYLALAHMIKFRGHFLIEGDLNPDNSDMDKLFIQLVQTYNQLFEENINASRVDAKAILSARLSKSRRLENLIAQLPGEKRNGLFGNLIALSLGLTPNFKSNFDLAEDAKLQLSKDTYDDDLDNLLAQIGDQYADLFLAAKNLSDAILLSDILRVNSEITKAPLSASMIKRYDEHHQDLTLLKALVRQQLPEKYKEIFFDQSKNGYAGYIDGGASQEEFYKFIKPILEKMDGTEELLAKLNREDLLRKQRTFDNGSIPHQIHLGELHAILRRQEDFYPFLKDNREKIEKILTFRIPYYVGPLARGNSRFAWMTRKSEETITPWNFEEVVDKGASAQSFIERMTNFDKNLPNEKVLPKHSLLYEYFTVYNELTKVKYVTEGMRKPEFLSGKQKEAIVDLLFKTNRKVTVKQLKEDYFKKIECFDSVEISGVEDRFNASLGTYHDLLKIIKDKDFLDNEENEDILEDIVLTLTLFEDKEMIEERLKTYAHLFDDKVMKQLKRRHYTGWGRLSRKLINGIRDKQSGKTILDFLKDGFANRNFIQLIHDDSLTFKEAIQKAQVSGQGHSLHEQIANLAGSPAIKKGILQSVKVVDELVKVMGHKPENIVIEMARENQTTQKGQKNSRERMKRIEEGIKELGSQILKEHPVENTQLQNEKLYLYYLQNGRDMYVDQELDINRLSDYDVDHIVPQSFIKDDSIDNKVLTRSDKNRGKSDDVPSEEVVKKMKNYWRQLLNAKLITQRKFDNLTKAERGGLSELDKAGFIKRQLVETRQITKHVAQILDSRMNTKYDENDKLIREVKVITLKSKLVSDFRKDFQFYKVREINNYHHAHDAYLNAVVGTALIKKYPKLESEFVYGDYKVYDVSEQEIGKATAKRFFYSNIMNFFKTEITLANGEIRKRPLIETNEETGEIVWNKGRDFATVRKVLSMPQVNIVKKTEVQTGALTNESIYARGSFDKLISRKHRFESSKYGGFGSPTVTYSVLVVAKSKVQDGKVKKIKTGKELIGITLLDKLVFEKNPLKFIEDKGYGNVQIDKCIKLPKYSLFEFENGTRRMLASRGDLQKANEMFLPAKLVTLLYHAHKIESSKELEHEAYILDHYNDLYQLLSYIERFASLYVDVEKNISKVKELFSNIESYSISEICSSVINLLTLTASGAPADFKFLGTTIPRKRYGSPQSILSSTLIHQSITGLYETRIDLSQLGGD

SEQ ID NO: 103 - protein, 1356 aa, Streptococcus dysgalactiae
MDKKYSIGLDIGTNSVGWAVITDDYKVPSKKFKVLGNTDRHSIKKNLIGALLFDSGETAEATRLKRTARRRYTRRKNRIRYLQEIFSSEMSKVDDSFFHRLEESFLVEEDKKHERHPIFGNIVDEVAYHEKYPTIYHLRKKLADSTDKADLRLIYLALAHMIKFRGHFLIEGDLNPDNSDMDKLFIQLVQTYNQLFEENINASRVDAKAILSARLSKSRRLENLIAQLPGEKRNGLFGNLIALSLGLTPNFKSNFDLAEDAKLQLSKDTYDDDLDNLLAQIGDQYADLFLAAKNLSDAILLSDILRVNSEITKAPLSASMIKRYDEHHQDLTLLKALVRQQLPEKYKEIFFDQSKNGYAGYIDGGASQEEFYKFIKPILEKMDGTEELLAKLNREDLLRKQRTFDNGSIPHQIHLGELHAILRRQEDFYPFLKDNREKIEKILTFRIPYYVGPLARGNSRFAWMTRKSEETITPWNFEEVVDKGASAQSFIERMTNFDKNLPNEKVLPKHSLLYEYFTVYNELTKVKYVTEGMRKPEFLSGKQKEAIVDLLFKTNRKVTVKQLKEDYFKKIECFDSVEISGVEDRFNASLGTYHDLLKIIKDKDFLDNEENEDILEDIVLTLTLFEDKEMIEERLKKYANLFDDKVMKQLKRRHYTGWGRLSRKLINGIRDKQSGKTILDFLKDGFANRNFMQLINDDSLTFKEAIQKAQVSGQGHSLHEQIANLAGSPAIKKGILQSVKVVDELVKVMGHKPENIVIEMARENQTTQKGQKNSRERMKRIEEGIKELGSQILKEHPVENTQLQNEKLYLYYLQNGRDMYVDQELDINRLSDYDVDHIVPQSFIKDDSIDNKVLTRSDKNRGKSDNVPSEEVVKKMKNYWRQLLNAKLITQRKFDNLTKAERGGLSELDKAGFIKRQLVETRQITKHVAQILDSRMNTKYDENDKLIREVKVITLKSKLVSDFRKDFQFYKVREINNYHHAHDAYLNAVVGTALIKKYPKLESEFVYGDYKVYDVSEQEIGKATAKRFFYSNIMNFFKTEITLANGEIRKRPLIETNEETGEIVWDKGRDFATVRKVLSMPQVNIVKKTEVQTGALTNESIYARGSFDKLISRKHRFESSKYGGFGSPTVTYSVLVVAKSKVQDGKVKKIKTGKELIGITLLDKLVFEKNPLKFIEDKGYGNVQIDKCIKLPKYSLFEFENGTRRMLASRGDLQKANEMFLPAKLVTLLYHAHKIESSKELEHEAYILDHYNDLYQLLSYIERFASLYVDVEKNISKVKELFSNIESYSISEICSSVINLLTLTASGAPADFKFLGTTIPRKRYGSPQSILSSTLIHQSITGLYETRIDLSQLGGD

SEQ ID NO: 104 - protein, 1356 aa, Streptococcus dysgalactiae
MDKKYSIGLDIGTNSVGWAVITDDYKVPSKKFKVLGNTDRHSIKKNLIGALLFDSGETAEATRLKRTARRRYTRRKNRIRYLQEIFSSEMSKVDDSFFHRLEESFLVEEDKKHERHPIFGNIVDEVAYHEKYPTIYHLRKKLADSTDKADLRLIYLALAHMIKFRGHFLIEGDLNPDNSDMDKLFIQLVQTYNQLFEENINASRVDAKAILSARLSKSRRLENLIAQLPGEKRNGLFGNLIALSLGLTPNFKSNFDLAEDAKLQLSKDTYDDDLDNLLAQIGDQYADLFLAAKNLSDAILLSDILRVNSEITKAPLSASMIKRYDEHHQDLTLLKALVRQQLPEKYKEIFFDQSKNGYAGYIDGGASQEEFYKFIKPILEKMDGTEELLAKLNREDLLRKQRTFDNGSIPHQIHLGELHAILRRQEDFYPFLKDNREKIEKILTFRIPYYVGPLARGNSRFAWMTRKSEETITPWNFEEVVDKGASAQSFIERMTNFDKNLPNEKVLPKHSLLYEYFTVYNELTKVKYVTEGMRKPEFLSGKQKEAIVDLLFKTNRKVTVKQLKEDYFKKIECFDSVEISGVEDRFNASLGTYHDLLKIIKDKDFLDNEENEDILEDIVLTLTLFEDKEMIEERLKTYAHLFDDKVMKQLKRRHYTGWGRLSRKLINGIRDKQSGKTILDFLKDGFANRNFIQLIHDDSLTFKEAIQKAQVSGQGHSLHEQIANLAGSPAIKKGILQSVKVVDELVKVMGHKPENIVIEMARENQTTQKGQKNSRERMKRIEEGIKELGSQILKEHPVENTQLQNEKLYLYYLQNGRDMYVDQELDINRLSDYDVDHIVPQSFIKDDSIDNKVLTRSDKNRGKSDDVPSEEVVKKMKNYWRQLLNAKLITQRKFDNLTKAERGGLSELDKAGFIKRQLVETRQITKHVAQILDSRMNTKYDENDKLIREVKVITLKSKLVSDFRKDFQFYKVREINNYHHAHDAYLNAVVGTALIKKYPKLESEFVYGDYKVYDVSEQEIGKATAKRFFYSNIMNFFKTEITLANGEIRKRPLIETNEETGEIVWDKGRDFATVRKVLSMPQVNIVKKTEVQTGALTNESIYARGSFDKLISRKHRFESSKYGGFGSPTVTYSVLVVAKCKVQDGKVKKIKTGKELIGITLLDKLVFEKNPLKFIEDKGYGNVQIDKCIKLPKYSLFEFENGTRRMLASRGDLQKANEMFLPAKLVTLLYHAHKIESSKELEHEAYILDHYNDLYQLLSYIERFASLYVDVEKNISKVKELFSNIESYSISEICSSVINLLTLTASGAPADFKFLGTTIPRKRYGSPQSILSSTLIHQSITGLYETRIDLSQLGGD

SEQ ID NO: 105 - protein, 1356 aa, Streptococcus dysgalactiae
MDKKYSIGLDIGTNSVGWAVITDDYKVPSKKFKVLGNTDRHSIKKNLIGALLFDSGETAEATRLKRTARRRYTRRKNRIRYLQEIFSSEMSKVDDSFFHRLEESFLVEEDKKHERHPIFGNIVDEVAYHEKYPTIYHLRKKLADSTDKADLRLIYLALAHMIKFRGHFLIEGDLNPDNSDVDKLFIQLVQTYNQLFEENINASRVDAKAILSARLSKSRRLENLIAQLPGEKRNGLFGNLIALSLGLTPNFKSNFDLAEDAKLQLSKDTYDDDLDNLLAQIGDQYADLFLAAKNLSDAILLSDILRVNSEITKAPLSASMIKRYDEHHQDLTLLKALVRQQLPEKYKEIFFDQSKNGYAGYIDGGASQEEFYKFIKPILEKMDGTEELLAKLNREDLLRKQRTFDNGSIPHQIHLGELHAILRRQEDFYPFLKDNREKIEKILTFRIPYYVGPLARGNSRFAWMTRKSEETITPWNFEEVVDKGASAQSFIERMTNFDKNLPNEKVLPKHSLLYEYFTVYNELTKVKYVTEGMRKPAFLSGEQKKAIVDLLFKTNRKVTVKQLKEDYFKKIECFDSVEISGVEDRFNASLGTYHDLLKIIKDKDFLDNEENEDILEDIVLTLTLFEDKEMIEERLKTYAHLFDDKVMKQLKRRHYTGWGRLSRKLINGIRDKQSGKTILDFLKDGFANRNFIQLIHDDSLTFKEAIQKAQVSGQGHSLHEQIANLAGSPAIKKGILQSVKVVDELVKVMGHKPENIVIEMARENQTTQKGQKNSRERMKRIEEGIKELGSQILKEHPVENTQLQNEKLYLYYLQNGRDMYVDQELDINRLSDYDVDHIVPQSFIKDDSIDNKVLTRSDKNRGKSDNVPSEEVVKKMKNYWRQLLNAKLITQRKFDNLTKAERGGLSELDKAGFIKRQLVETRQITKHVAQILDSRMNTKYDENDKLIREVKVITLKSKLVSDFRKDFQFYKVREINNYHHAHDAYLNAVVGTALIKKYPKLESEFVYGDYKVYDVSEQEIGKATAKRFFYSNIMNFFKTEITLANGEIRKRPLIETNEETGEIVWDKGRDFATVRKVLSMPQVNIVKKTEVQTGALTNESIYARGSFDKLISRKHRFESSKYGGFGSPTVTYSVLVVAKSKVQDGKVKKIKTGKELIGITLLDKLVFEKNPLKFIEDKGYGNVQIDKCIKLPKYSLFEFENGTRRMLASRGDLQKANEMFLPAKLVTLLYHAHKIESSKELEHEAYILDHYNDLYQLLSYIERFASLYVDVEKNISKVKELFSNIESYSISEICSSVINLLTLTASGAPADFKFLGTTIPRKRYGSPQSILSSTLIHQSITGLYETRIDLSQLGGD

SEQ ID NO: 106 - protein, 1345 aa, Streptococcus equi
MKKPYTIALDIGTNSVGWVVVTDDYRVPTKKMKVLGNTERKTIKKNLIGALLFDSGDTAEGTRLKRTARRRYTRRKNRLRYLKEIFTEEMAKVDDGFFQRLEDSFYVLEDKEGNKHPIFANLADEVAYHKKYPTIYHLRKELVDNPQKADLRLIYLAVAHIIKFRGHFLIEGTLSSKNNNLQKSFDHLVDTYNLLFEEQLLTEGINAKELLSAALSKSKRLENLISLIPGQKKTGIFGNIIALSLGLTPNFKANFGLSKDVKLQLAKDTYADDLDSLLAQIGDQYADLFLAAKNLSDAILLSDILTESDEITRAPLSASMVKRYREHHKDLVTLKTLIKDQLPEKYQEIFLDKTKNGYAGYIEGQVSQEEFYKYLKPILARLDGSEPLLLKIDREDFLRKQRTFDNGSIPHQIHLEELHAILRRQEVFYPFLKDNRKKIESLLTFRIPYYVGPLARGHSRFAWVKRKFDGAIRPWNFEEIVDEEASAQIFIEKMTKNDLYLPNEKVLPKHSLLYETFTVYNELTKVKYATEGMTRPQFLSADQKQAIVDLLFKTNRKVTVKQLKENYFKKIECWDSVEITGVEDSFNASLGTYHDLLKIIQDKDFLDNPDNQKIIEDIILTLTLFEDKKMISKRLDQYAHLFDKVVLNKLERHHYTGWGRLSGKLINGIRDKQSGKTILDFLKDGFANRNFMQLIHDSELSFIDEIAKAQVIGKTEYSKDLVGNLAGSPAIKKGISQTIKIVDELVKIMGYLPQQIVIEMARENQTTAQGIKNARQRMRKLEETAKKLGSNILKEHPVDNSQLQNDKRYLYYLQNGKDMYTGDDLDIDYLSSYDIDHIIPQSFIKNNSIDNKVLTSQGANRGKLDNVPSEAIVRKMKGYWQSLLRAGAISKQKFDNLTKAERGGLTQVDKAGFIQRQLVETRQITKHVAQILDSRFNTEFDDHNKRIRKVHIITLKSKLVSDFRKEFGLYKIRDINHYHHAHDAYLNAVVAKAILGKYPQLAPEFVYGDYPKYNSFKERQKATQKMLFYSNILKFFKDQESLHVNSDGEEIWNANKHLPIIKNVLSIPQVNIVKKTEVQTGGFYKESILSKGNSDKLIPRKNNWDTRKYGGFDSPTVAYSVLVIAKMEKGKAKVLKPVKEMVGITIMERTAFEENPVVFLEARGYREIQEHLIIKLPKYSLFELENGRRRLLASSELQKGNELFLPVDYMTFLYLAAHYHELTGSSEDVLRKKYFVDRHLHYFDDIIQMINDFAERHILASSNLEKINHTYHNNSDLPVNERAENIINVFTFVALGAPAAFKFFDATIDRKRYTSTKEVLNATLIHQSVTGLYETRIDLSQLGEN

SEQ ID NO: 107 - protein, 1345 aa, Streptococcus equi
MKKPYTIALDIGTNSVGWVVVTDDYRVPTKKMKVLGNTERKTIKKNLIGALLFDSGDTAEGTRLKRTARRRYTRRKNRLRYLKEIFTEEMAKVDDGFFQRLEDSFYVLEDKEGNKHPIFANLADEVAYHKKYPTIYHLRKELVDNPQKADLRLIYLAVAHIIKFRGHFLIEGTLSSKNNNLQKSFDHLVDTYNLLFEEQLLTEGINAKELLSAALSKSKRLENLISLIPGQKKTGIFGNIIALSLGLTPNFKANFGLSKDVKLQLAKDTYADDLDSLLAQIGDQYADLFLAAKNLSDAILLSDILTESDEITRAPLSASMVKRYREHHKDLVTLKTLIKDQLPEKYQEIFLDKTKNGYAGYIEGQVSQEEFYKYLKPILARLDGSEPLLLKIDREDFLRKQRTFDNGSIPHQIHLEELHAILRRQEVFYPFLKDNRKKIESLLTFRIPYYVGPLARGHSRFAWVKRKFDGAIRPWNFEEIVDEEASAQIFIEKMTKNDLYLPNEKVLPKHSLLYETFTVYNELTKVKYATEGMTRPQFLSADQKQAIVDLLFKTNRKVTVKQLKENYFKKIECWDSVEITGVEDSFNASLGTYHDLLKIIQDKDFLDNPDNQKIIEDIILTLTLFEDKKMISKRLDQYAHLFDKVVLNKLERHHYTGWGRLSGKLINGIRDKQSGKTILDFLKDGFANRNFMQLIHDSELSFIDEIAKAQVIGKTEYSKDLVGNLASSPAIKKGISQTIKIVDELVKIMGYLPQQIVIEMARENQTTAQGIKNARQRMRKLEETAKKLGSNILKEHPVDNSQLQNDKRYLYYLQNGKDMYTGDDLDIDYLSSYDIDHIIPQSFIKNNSIDNKVLTSQGANRGKLDNVPSEAIVRKMKGYWQSLLRAGAISKQKFDNLTKAERGGLTQVDKAGFIQRQLVETRQITKHVAQILDSRFNTEFDDHNKRIRKVHIITLKSKLVSDFRKEFGLYKIRDINHYHHAHDAYLNAVVAKAILGKYPQLAPEFVYGDYPKYNSFKERQKATQKTLFYSNILKFFKDQESLHVNSDGEEIWNANKHLPIIKNVLSIPQVNIVKKTEVQTGGFYKESILSKGNSDKLIPRKNNWDTRKYGGFDSPTVAYSVLVIAKMEKGKAKVLKPVKEMVGITIMERIAFEENPVVFLEAKGYREIQEHLIIKLPKYSLFELENGRRRLLASSELQKGNELFLPVDYMTFLYLAAHYHELTGSSEDVLRKKYFVERHLHYFDDIIQMINDFAERHILASSNLEKINHTYHNNSDLPINERAENIINVFTFVALGAPAAFKFFDATIDRKRYTSTKEVLNATLIHQSVTGLYETRIDLSQLGEN

SEQ ID NO: 108 - protein, 1345 aa, Streptococcus equi
MKKPYTIALDIGTNSVGWVVVTDDYRVPTKKMKVLGNTERKTIKKNLIGALLFDSGDTAEGTRLKRTARPRYTRRKNRLRFLKEIFTEEMAKVDDGFFQRLEDSFYVLEDKEGNKHPIFANLADEVAYHKKYPTIYHLRKELVDNPQKADLRLIYLAVAHIIKFRGHFLIEGTLSSKNNNLQKSFDHLVDTYNLLFEEQLLTEGINAKELLSAALSKSKRLENLISLIPGQKKTGIFGNIIALSLGLTPNFKANFGLSKDVKLQLAKDTYADDLDSLLAQIGDQYADLFLAAKNLSDAILLSDILTESDEITRAPLSASMVKRYREHHKDLVTLKTLIKDQLPEKYQEIFLDKTKNGYAGYIEGQVSQEEFYKYLKPILARLDGSEPLLLKIDREDFLRKQRTFDNGSIPHQIHLEELHAILRRQEVFYPFLKDNRKKIESLLTFRIPYYVGPLARGHSRFAWVKRKFDGAIRPWNFEEIVDEEASAQIFIEKMTKNDLYLPNEKVLPKHSLLYETFTVYNELTKVKYATEGMTRPQFLSADQKQAIVDLLFKTNRKVTVKQLKENYFKKIECWDSVEITGVEDSFNASLGTYHDLLKIIQDKDFLDNPDNQKIIEDIILTLTLFEDKKMISKRLDQYAHLFDKVVLNKLERHHYTGWGRLSGKLINGIRDKQSGKTILDFLKDGFANRNFMQLIHDSELSFIDEIAKAQVIGKTEYSKDLVGNLAGSPAIKKGISQTIKIVDELVKIMGYLPQQIVIEMARENQTTAQGIKNARQRMRKLEETAKKLGSNILKEHPVDNSQLQNDKRYLYYLQNGKDMYTGDDLDIDYLSSYDIDHIIPQSFIKNNSIDNKVLTSQGANRGKLDNVPSEAIVRKMKGYWQSLLRAGAISKQKFDNLTKAERGGLTQVDKAGFIQLQLVETRQITKHVAQILDSRFNTEFDDHNKRIRKVHIITLKSKLVSDFRKEFGLYKIRDINHYHHAHDAYLNAVVAKAILGKYPQLAPEFVYGDYPKYNSFKERQKATQKTLFYSNILKFFKDQESLHVNSDGEEIWNANKHLPIIKNVLSIPQVNIVKKTEVQTGGFYKESILSKGNSDKLIPRKNNWDTRKYGGFDSPTVAYSVLVIAKMEKGKAKVLKPVKEMVGITIMERIAFEENPVVFLEAKGYREIQEHLIIKLPKYSLFELENGRRRLLASSELQKGNELFLPVDYMTFLYLAAHYHELTGSSEDVLRKKYFVERHLHYFDDIIQMINDFAERHILASSNLEKINHTYHNNSDLPVNERAENIINVFTFVALGAPAAFKFFDATIDRKRYTSTKEVLNATLIHQSVTGLYETRIDLSQLGEN

SEQ ID NO: 109 - protein, 1360 aa, Streptococcus equinus
MEKTYSIGLDIGTNSVGWAVITDDYKVPAKKMKVLGNTDKKYIKKNLLGALLFDSGETAEATRLKRAARRRYTRRKNRLRYLQEIFAKEMAKVDESFFQRLEESFLTDDDKTFDSHPIFGNKAEEDTYHQEFPTIYHLRKHLADSPEKVDLRLVYLALAHMIKFRGHFLIEGQLNAENTDVQKIFADFVGVYDRTFDDSHLSEITVDAASILTEKISKSRRLENLIKQYPTEKKNTLFGNLVALALGLQPNFKTNFKLSEDAKLQFSKDTYDEDLEELLGKIGDDYADLFTAAKNLYDAILLSGILTVDDNSTKAPLSASMIKRYEEHHEDLEKLKTFIKVNNFDKYHEIFKDKSKNGYAGYIENGVKQDIFYKHLKSIISEKNGGQYFLDKIEREDFLRKQRTFDNGSIPYQIHLQEMRTILRRQGEYYPFLKENQAKIEKILTFRIPYYVGPLARKNSRFAWAKYHSDEPITPWNFDEVVDKEKSAEKFITRMTLNDLYLPEEKVLPKHSYVYETFAVYNELTKIKYVNEQGKSFFFDANMKQEIFDHVFKENRKVTKAKLLSYLNNEFEEFRINDLIGLDKDSKSFNASLGTYHDLKKILDKSFLDDKTNEQIIEDIVLTLTLFEDRDMIHERLQKYSDIFTSQQLKKLERRHYTGWGRLSYKLINGIRNKENNKTILDFLIDDGDANRNFMQLINDDSLSFKTTIQEAQVVGDVDDIEAVVHDLPGSPAIKKGILQSVKIVDELVKVMGHNPQNIVIEMARENQITGYGRNRSNQRLKRLQDSLKPSYVDSKVENSHLQNDRLFLYYIQNGKDMYTGEELDIDHLSDYDIDHIIPQAFIKDNSIDNRVLTSSAKNRGKSDDVPSIEIVRNRKSYWYKLYKSGLISKRKFDNLTKAERGGLTETDKAGFIKRQLVETRQITKHVAQILDARFNTKCDENDKVIRDVKVITLKSSLVSQFRKEFKFYKVREINDYHHAHDAYLNAVVGTALLKKYPKLAPEFVYGEYKKYDVSSDNHSELGKATAKYFFYSNLMNFFKTEVKYADGRVFERPDIETNADGEVVWNKQRDFNIVRKVLSYPQVNIVKKVEVQTGGFSKESILPKGDSDKLIPRKTKKLQWETQKYGGFDSPTVAYSVLVVADVEKGKTRKLKTVKELVGISIMERSSFEENPVSFLEKKGYHNVQEDKLIKLPKYSLFEFEGGRRRLLASATELQKGNEVVLPQYMVNLLYHSQHVNNSHKPEHLNYVKQHKDEFKDIFNLIISIARINILKPKVVDNLINEFTEYGQEDISSLSESFINLLKFISFGAPGAFKFLKLDVKQSNLRYKSTTEALSATLIHQSVTGLYETRIDLSKLGEE

SEQ ID NO: 110 - protein, 1353 aa, Streptococcus gallolyticus
MTKKNYSIGLDIGTNSVGWAVITDDYKVPAKKMKVLGNTDKKYIKKNLLGALLFDSGETAEATRLKRTARRRYTRRKNRLRYLQEIFAEEMTKVDESFFYRLDESFLTTDEKDFERHPIFGNKAEEDAYHQKFPTIYHLRNYLADSSEKADLRLVYLALAHMIKYRGHFLIEGKLNAENTDVQKLFTDFVGVYDRTFDDSHLSEITVDVASTLTEKISKSRRLENLIKYYPTEKKNTLFGNLIALALGLQPNFKMNFKLSEDAKLQFSKDTYEEDLEELLGKIGDDYADLFTSAKNLYDAILLSGILTVDDNSTKAPLSASMIKRYVEHHEDLEKLKEFIKANKSELYHDIFKDKNKNGYAGYIENGVKQDEFYKYLKNTLSKIDGSDYFLDKIEREDFLRKQRTFDNGSIPHQIHLQEMHAILRRQGDYYPFLKEKQDRIEKILTFRIPYYVGPLVRKDSRFAWAEYRSDEKITPWNFDKVIDKEKSAEKFITRMTLNDLYLPEEKVLPKHSHVYETYAVYNELTKIKYVNEQGKESFFDSNMKQEIFDHVFKENRKVTKEKLLNYLNKEFPEYRIKDLIGLDKENKSFNASLGTYHDLKKILDKAFLDDKVNEEVIEDIIKTLTLFEDKDMIHERLQKYSDIFTANQLKKLERRHYTGWGRLSYKLINGIRNKENNKTILDYLIDDGSANRNFMQLINDDTLPFKQIIQKSQVVGDVDDIEAVVHDLPGSPAIKKGILQSVKIVDELVKVMGDNPDNIVIEMARENQTTNRGRSQSQQRLKKLQSSLKPSYIEDKVENSHLQNDQLFLYYIQNGKDMYTGDELDIDHLSDYDIDHIIPQAFIKDDSIDNRVLTSSAKNRGKSDDVPSLDIVRARKAEWVRLYKSGLISKRKFDNLTKAERGGLTEADKAGFIKRQLVETRQITKHVAQILDARFNTEHDENDKVIRDVKVITLKSNLVSQFRKDFEFYKVREINDYHHAHDAYLNAVVGTALLKKYPKLASEFVYGEYKKYDISSDKATAKYFFYSNLMNFFKTKVKYADGTVFERPIIETNADGEIAWNKQIDFEKVRKVLSYPQVNIVKKVETQTGGFSKESILPKGDSDKLIPRKTKKVYWDTKKYGGFDSPTVAYSVFVVADVEKGKAKKLKTVKELVGISIMERSFFEENPVEFLENKGYHNIREDKLIKLPKYSLFEFEGGRRRLLASASELQKGNEMVLPGYLVELLYHAHRADNFNSTEYLNYVSEHKKEFEKVLSCVEDFANLYVDVEKNLSKIRAVADSMDNFSIEEISNSFINLLTLTALGAPADFNFLGEKIPRKRYTSTKECLTATLIHQSITGLYETRIDLSKLGEE

SEQ ID NO: 111 - protein, 1354 aa, Streptococcus gallolyticus
MTEKNYSIGLDIGTNSVGWAVITDDYKVPAKKMKVLGNTDKKYIKKNLLGALLFDNGETAEATRLKRTARRRYTRRKNRLRYLQEIFAEEMAKVDESFFYRLDESFLTTDDKDFERHPIFGNKADEIKYHQEFPTIYHLRKHLADSHEKADLRLIYLALAHMIKFRGHFLIEGELNAENTDVQKLFEAFVEVYDRTFDDSNLSEITVDASSILTEKFSKSRRLENLIKHYPTEKKNTLFGNLVALALGLQPNFKTSFKLSEDAKLQFSKDTYEEDLEELIGKIGDEYADLFTSAKNLYDAILLSGILTVADNTTKAPLSASMIKRYNEHQVDLKKLKEFIKNNASDKYDEIFNDKDKNGYAGYIENGVKQDEFYKYLKTTLSKIDGSDYFLDKIEREDFLRKQRTFDNGSIPHQIHLQEMHAILRRQGEHYAFLKENQAKIEKILTFRIPYYVGPLARKNSRFAWAEYHSDEKITPWNFDEIIDKEKSAEKFITRMTLNDLYLPEEKVLPKHSLVYETYTVYNELTKVKYVNEQGKSNFFDANMKQEIFEHVFKENRKVTKDKFLNYLNKEFPEYRIQDLIGLDKENKSFNASLGTYHDLKKILDKSFLDDKTNETIIEDIIQTLTLFEDRDMIRQRLQKYSDIFTPQQLKKLERRHYTGWGRLSYKLINGIRNKENGKSILDYLIDDGYANRNFMQLISDDTLPFKQIIKDAQIIGDIDDVTSVVRELPGSPAIKKGILQSVKIVDELVKVMGHNPDNIVIEMARENQTTNRGRNQSQQRLKKLQDSLKPSYIEGKVENNHLQDDRLFLYYIQNGKDMYTGDELDIDHLSDYDIDHIIPQAFIKDDSIDNRVLTSSAKNRGKSDDVPSLDIVHDRKADWIRLYKSGLISKRKFDNLTKAERGGLTENDKAGFIKRQLVETRQITKHVAQILDSRFNTERDENDKVIRNVKVITLKSNLVSQFRKDFKFYKVREINDYHHAHDAYLNAVVGTALLKKYPKLAPEFVYGEYKKYDISGDKATAKYFFYSNLMNFFKRVIRYSNGKVVVRPVIECSKDTGEIAWNKQTDFEKVRRVLSYPQVNIVKKVETQTGGFSKESILPKGNSDKLIPRKTKKFRWDTPKYGGFDSPNIAYSVFVIADVEKGKAKKLKTVKELVGISIMERSSFEENPVVFLEKKGYQNVQEDNLIKLPKYSLFEFEGGRRRLLASASELQKGNEVVLSRHLVELLYHAHRVNSFNNSEHLKYVSEHKKEFGEVLSCVENFAKSYVDVEKNLGKIRAVADKIDTFSIEDISISFVNLLTLTALGAPADFNFLGEKIPRKRYTSTKECLNATLIHQSITGLYETRIDLSKLGEE

SEQ ID NO: 112 - protein, 1355 aa, Streptococcus gallolyticus; identical to SEQ ID NO: 11

SEQ ID NO: 113 - protein, 1358 aa, Streptococcus infantarius
MEKSYSIGLDIGTNSVGWAVITDDYKVPAKKMKVLGNTDKKYIKKNLLGALLFDSGETAEVTRLKRTARRRYTRRKNRLRYLQEIFAKEMTKVDESFFQRLEESFLTDDDKTFDSHPIFGNKAEEDAYHQKFPTIYHLRKYLADSQEKADLRLVYLALAHMIKYRGHFLIEGELNAENTDVQKLFNVFVETYDKIVDESHLSEIEVDASSILTEKVSKSRRLENLIKQYPTEKKNTLFGNLIALALGLQPNFKTNFKLSEDAKLQFSKDTYEEDLEELLGKVGDDYADLFISAKNLYDAILLSGILTVDDNSTKAPLSASMIKRYVEHHEDLEKLKEFIKINKLKLYHDIFKDKTKNGYAGYIDNGVKQDEFYKYLKTILTKIDDSDYFLDKIERDDFLRKQRTFDNGSIPHQIHLQEMHSILRRQGDYYPFLKENQAKIEKILTFRIPYYVGPLARKDSRFAWANYHSDEPITPWNFDEVVDKEKSAEKFITRMTLNDLYLPEEKVLPKHSHVYETFTVYNELTKIKYVNEQGESFFFDANMKQEIFDHVFKENRKVTKAKLLSYLNNEFEEFRINDLIGLDKDSKSFNASLGTYHDLKKILDKSFLDDKTNGQIIEDIVLTLTLFEDRDMIHERLQKYSDFFTSQQLKKLERRHYTGWGRLSYKLINGIRNKENNKTILDFLIDDGHANRNFMQLINDESLSFKTIIQEAQVVGDVDDIEAVVHDLPGSPAIKKGILQSVKIVDELVKVMGDNPDNIVIEMARENQTTGYGRNKSNQRLKRLQDSLKPSYVDSKVENSHLQNDRLFLYYIQNGKDMYTGEELDIDRLSDYDIDHIIPQAFIKDNSIDNKVLTSSAKNRGKSDDVPSIEIVRNRRSYWYKLYKSGLISKRKFDNLTKAERGGLTEADKAGFIKRQLVETRQITKHVAQILDARFNTKRDENDKVIRDVKVITLKSNLVSQFRKEFKFYKVREINDYHHAHDAYLNAVVGTALLKKYPKLTPEFVYGEYKKYDVSSDDYSEMGKATAKYFFYSNLMNFFKTEVKYADGRVFERPDIETNADGEVVWNKQKDFDIVRKVLSYPQVNIVKKVEAQTGGFSKESILSKGDSDKLIPRKTKKVYWNTKKYGGFDSPTVAYSVLVVADIEKGKAKKLKTVKELVGISIMERSFFEENPVSFLEKKGYHNVQEDKLIKLPKYSLFEFEGGRRRLLASATELQKGNEVMLPAHLVELLYHAHRIDSFNSTEHLKYVSEHKKEFEKVLSCVENFSNLYVDVEKNLSKVRAAAESMTNFSLEEISASFINLLTLTALGAPADFNFLGEKIPRKRYTSTKECLSATLIHQSVTGLYETRIDLSKLGEE

SEQ ID NO: 114 - protein, 1358 aa, Streptococcus iniae
MRKPYSIGLDIGTNSVGWAVITDDYKVPSKKMRIQGTTDRTSIKKNLIGALLFDNGETAEATRLKRTTRRRYTRRKYRIKELQKIFSSEMNELDIAFFPRLSESFLVSDDKEFENHPIFGNLKDEITYHNDYPTIYHLRQTLADSDQKADLRLIYLALAHIIKFRGHFLIEGNLDSENTDVHVLFLNLVNIYNNLFEEDVETASIDAEKILTSKTSKSRRLENLIAEIPNQKRNMLFGNLVSLALGLTPNFKTNFELLEDAKLQISKDSYEEDLDNLLAQIGDQYADLFIAAKKLSDAILLSDIITVKGASTKAPLSASMVQRYEEHQQDLALLKNLVKKQIPEKYKEIFDNKEKNGYAGYIDGKTSQEEFYKYIKPILLKLDGTEKLISKLEREDFLRKQRTFDNGSIPHQIHLNELKAIIRRQEKFYPFLKENQKKIEKLFTFKIPYYVGPLANGQSSFAWLKRQSNESITPWNFEEVVDQEASARAFIERMTNFDTYLPEEKVLPKHSPLYEMFMVYNELTKVKYQTEGMKRPVFLSSEDKEEIVNLLFKKERKVTVKQLKEEYFSKMKCFHTVTILGVEDRFNASLGTYHDLLKIFKDKAFLDDEANQDILEEIVWTLTLFEDQAMIERRLVKYADVFEKSVLKKLKKRHYTGWGRLSQKLINGIKDKQTGKTILGFLKDGVANRNFMQLINDSSLDFAKIIKNEQEKTIKNESLEETIANLAGSPAIKKGILQSIKIVDEIVKIMGQNPDNIVIEMARENQSTMQGIKNSRQRLRKLEEVHKNTGSKILKEYNVSNTQLQSDRLYLYLLQDGKDMYTGKELDYDNLSQYDIDHIIPQSFIKDNSIDNTVLTTQASNRGKSDNVPNIETVNKMKSFWYKQLKSGAISQRKFDHLTKAERGALSDFDKAGFIKRQLVETRQITKHVAQILDSRFNSNLTEDSKSNRNVKIITLKSKMVSDFRKDFGFYKLREVNDYHHAQDAYLNAVVGTALLKKYPKLEAEFVYGDYKHYDLPDSSLGKATTRMFFYSNLMNFFKKEIKLADDTIFTRPQIEVNTETGEIVWDKVKDMQTIRKVMSYPQVNIVMKTEVQTGGFSKESIWPKGDSDKLIARKKSWDPKKYGGFDSPIIAYSVLVVAKIAKGKTQKLKTIKELVGIKIMEQDEFEKDPIAFLEKKGYQDIQTSSIIKLPKYSLFELENGRKRLLASELQKGNELALPNKYVKFLYLASHYTKFTGKEEDREKKRSYVESHLYYFDEIMQIIVEYSNRYILADSNLIKIQNLYKEKDNFSIEEQAINMLNLFTFTDLGAPSAFKFFNGDIDRKRYSSTNEIINSTLIYQSPTGLYETRIDLSKLGGK

SEQ ID NO: 115 - protein, 1263 aa, Streptococcus iniae
  VARIANT 1257: note = X can be any naturally occurring amino acid
MRKPYSIGLDIGTNSVGWAVITDDYKVPSKKMRIQGTTDRTSIKKNLIGALLFDNGETAEATRLKRTTRRRYTRRKYRIKELQKIFSSEMNELDIAFFPRLSESFLVSDDKEFENHPIFGNLKDEITYHNDYPTIYHLRQTLADSDQKADLRLIYLALAHIIKFRGHFLIEGNLDSENTDVHVLFLNLVNIYNNLFEEDVETASIDAEKILTSKTSKSRRLENLIAEIPNQKRNMLFGNLVSLALGLTPNFKTNFELLEDAKLQISKDSYEEDLDNLLAQIGDQYADLFIAAKKLSDAILLSDIITVKGASTKAPLSASMVQRYEEHQQDLALLKNLVKKQIPEKYKEIFDNKEKNGYAGYIDGKTSQEEFYKYIKPILLKLDGTEKLISKLEREDFLRKQRTFDNGSIPHQIHLNELKAIIRRQEKFYPFLKENQKKIEKLFTFKIPYYVGPLANGQSSFAWLKRQSNESITPWNFEEVVDQEASARAFIERMTNFDTYLPEEKVLPKHSPLYEMFMVYNELTKVKYQTEGMKRPVFLSSEDKEEIVNLLFKKERKVTVKQLKEEYFSKMKCFHTVTILGVEDRFNASLGTYHDLLKIFKDKAFLDDEANQDILEEIVWTLTLFEDQAMIERRLVKYADVFEKSVLKKLKKRHYTGWGRLSQKLINGIKDKQTGKTILGFLKDGVANRNFMQLINDSSLDFAKIIKNEQEKTIKNESLEETIANLAGSPAIKKGILQSIKIVDEIVKIMGQNPDNIVIEMARENQSTMQGIKNSRQRLRKLEEVHKNTGSKILKEYNVSNTQLQSDRLYLYLLQDGKDMYTGKELDYDNLSQYDIDHIIPQSFIKDNSIDNTVLTTQASNRGKSDNVPNIETVNKMKSFWYKQLKSGAISQRKFDHLTKAERGALSDFDKAGFIKRQLVETRQITKHVAQILDSRFNSNLTEDSKSNRNVKIITLKSKMVSDFRKDFGFYKLREVNDYHHAQDAYLNAVVGTALLKKYPKLEAEFVYGDYKHYDLPDSSLGKATTRMFFYSNLMNFFKKEIKLADDTIFTRPQIEVNTETGEIVWDKVKDMQTIRKVMSYPQVNIVMKTEVQTGGFSKESIWPKGDSDKLIARKKSWDPKKYGGFDSPIIAYSVLVVAKIAKGKTQKLKTIKELVGIKIMEQDEFEKDPIAFLEKKGYQDIQTSSIIKLPKYSLFELENGRKRLLASELQKGNELALPNKYVKFLYLASHYTKFTGKEEDREKKRSYVESHLYYFXEVKSSF

SEQ ID NO: 116 - protein, 1257 aa, Streptococcus iniae
  VARIANT 1255: note = X can be any naturally occurring amino acid
  VARIANT 1257: note = X can be any naturally occurring amino acid
MRKPYSIGLDIGTNSVGWAVITDDYKVPSKKMRIQGTTDRTSIKKNLIGALLFDNGETAEATRLKRTTRRRYTRRKYRIKELQKIFSSEMNELDIAFFPRLSESFLVSDDKEFENHPIFGNLKDEITYHNDYPTIYHLRQTLADSDQKADLRLIYLALAHIIKFRGHFLIEGNLDSENTDVHVLFLNLVNIYNNLFEEDVETASIDAEKILTSKTSKSRRLENLIAEIPNQKRNMLFGNLVSLALGLTPNFKTNFELLEDAKLQISKDSYEEDLDNLLAQIGDQYADLFIAAKKLSDAILLSDIITVKGASTKAPLSASMVQRYEEHQQDLALLKNLVKKQIPEKYKEIFDNKEKNGYAGYIDGKTSQEEFYKYIKPILLKLDGTEKLISKLEREDFLRKQRTFDNGSIPHQIHLNELKAIIRRQEKFYPFLKENQKKIEKLFTFKIPYYVGPLANGQSSFAWLKRQSNESITPWNFEEVVDQEASARAFIERMTNFDTYLPEEKVLPKHSPLYEMFMVYNELTKVKYQTEGMKRPVFLSSEDKEEIVNLLFKKERKVTVKQLKEEYFSKMKCFHTVTILGVEDRFNASLGTYHDLLKIFKDKAFLDDEANQDILEEIVWTLTLFEDQAMIERRLVKYADVFEKSVLKKLKKRHYTGWGRLSQKLINGIKDKQTGKTILGFLKDGVANRNFMQLINDSSLDFAKIIKNEQEKTIKNESLEETIANLAGSPAIKKGILQSIKIVDEIVKIMGQNPDNIVIEMARENQSTMQGIKNSRQRLRKLEEVHKNTGSKILKEYNVSNTQLQSDRLYLYLLQDGKDMYTGKELDYDNLSQYDIDHIIPQSFIKDNSIDNTVLTTQASNRGKSDNVPNIETVNKMKSFWYKQLKSGAISQRKFDHLTKAERGALSDFDKAGFIKRQLVETRQITKHVAQILDSRFNSNLTEDSKSNRNVKIITLKSKMVSDFRKDFGFYKLREVNDYHHAQDAYLNAVVGTALLKKYPKLEAEFVYGDYKHYDLPDSSLGKATTRMFFYSNLMNFFKKEIKLADDTIFTRPQIEVNTETGEIVWDKVKDMQTIRKVMSYPQVNIVMKTEVQTGGFSKESIWPKGDSDKLIARKKSWDPKKYGGFDSPIIAYSVLVVAKIAKGKTQKLKTIKELVGIKIMEQDEFEKDPIAFLEKKGYQDIQTSSIIKLPKYSLFELENGRKRLLASELQKGNELALPNKYVKFLYLASHYTKFTGKEEDREKKRSYVESHLYXFX

SEQ ID NO: 117 - protein, 199 aa, Streptococcus iniae
  source 1..199: note = IUSA1
MEQDEFEKDPIAFLEKKGYQDIQTSSIIKLPKYSLFELENGRKRLLASKELQKGNELALPNKYVKFLYLASHYTKFTGKEEDREKKRSYVESHLYYFDEIMQIIVEYSNRYILADSNLIKIQNLYKEKDNFSIEEQAINMLNLFTFTDLGAPSAFKFFNGDIDRKRYSSTNEIINSTLIYQSPTGLYETRIDLSKLGGK

SEQ ID NO: 118 - protein, 1271 aa, Streptococcus iniae
  source 1..1271: note = SF1
MRKPYSIGLDIGTNSVGWAVITDDYKVPSKKMRIQGTTDRTSIKKNLIGALLFDNGETAEATRLKRTTRRRYTRRKYRIKELQKIFSSEMNELDIAFFPRLSESFLVSDDKEFENHPIFGNLKDEITYHNDYPTIYHLRQTLADSDQKADLRLIYLALAHIIKFRGHFLIEGNLDSENTDVHVLFLNLVNIYNNLFEEDVETASIDAEKILTSKTSKSRRLENLIAEIPNQKRNMLFGNLVSLALGLTPNFKTNFELLEDAKLQISKDSYEEDLDNLLAQIGDQYADLFIAAKKLSDAILLSDIITVKGASTKAPLSASMVQRYEEHQQDLALLKNLVKKQIPEKYKEIFDNKEKNGYAGYIDGKTSQEEFYKYIKPILLKLDGTEKLISKLEREDFLRKQRTFDNGSIPHQIHLNELKAIIRRQEKFYPFLKENQKKIEKLFTFKIPYYVGPLANGQSSFAWLKRQSNESITPWNFEEVVDQEASARAFIERMTNFDTYLPEEKVLPKHSPLYEMFMVYNELTKVKYQTEGMKRPVFLSSEDKEEIVNLLFKKERKVTVKQLKEEYFSKMKCFHTVTILGVEDRFNASLGTYHDLLKIFKDKAFLDDEANQDILEEIVWTLTLFEDQAMIERRLVKYADVFEKSVLKKLKKRHYTGWGRLSQKLINGIKDKQTGKTILGFLKDGVANRNFMQLINDSSLDFAKIIKNEQEKTIKNESLEETIANLAGSPAIKKGILQSIKIVDEIVKIMGQNPDNIVIEMARENQSTMQGIKNSRQRLRKLEEVHKNTGSKILKEYNVSNTQLQSDRLYLYLLQDGKDMYTGKELDYDNLSQYDIDHIIPQSFIKDNSIDNTVLTTQASNRGKSDNVPNIETVNKMKSFWYKQLKSGAISQRKFDHLTKAERGALSDFDKAGFIKRQLVETRQITKHVAQILDSRFNSNLTEDSKSNRNVKIITLKSKMVSDFRKDFGFYKLREVNDYHHAQDAYLNAVVGTALLKKYPKLEAEFVYGDYKHYDLPDSSLGKATTRMFFYSNLMNFFKKEIKLADDTIFTRPQIEVNTETGEIVWDKVKDMQTIRKVMSYPQVNIVMKTEVQTGGFSKESIWPKGDSDKLIARKKSWDPKKYGGFDSPIIAYSVLVVAKIAKGKTQKLKTIKELVGIKIMEQDEFEKDPIAFLEKKGYQDIQTSSIIKLPKYSLFELENGRKRLLASELQKGNELALPNKYVKFLYLASHYTKFTGKEEDREKKRSYVESHLYYFDVRLSQVFRVTNVEF

SEQ ID NO: 119 - protein, 1345 aa, Streptococcus intermedius
MKKPYSIGLDIGTNSVGWAVVTDDYKVPAKKMKVLGNTDKSHIKKNLLGALLFDSGNTAEDRRLKRTARRRYTRRRNRILYLQEIFSEEMGKVDDSFFHRLEDSFLVTEDKRGERHPIFGNLEEEVKYHENFPTIYHLRQYLADNPEKTDLRLVYLALAHIIKFRGHFLIEGKFDTRNNDVQRLFQEFLAVYDNTFENSSLQEQNVQVEEILTDKISKSAKKDRVLKLFPNEKSNGRFAEFLKLIVGNQADFKKHFELEEKAPLQFSKDTYEEELEVLLAQIEDNYAELFLSAKKLYDSILLSGILTVTDVSTKAPLSASMIQRYNEHQMDLAQLKQFIRQKLSDKYNEVFSDVSKDGYAGYIDGKTNQEAFYKYLKGLLNKIEGSGYFLDKIEREDFLRKQRTFDNGSIPHQIHLQEMRAIIRRQAEFYPFLADNQDRIEKILTFRIPYYIGPLARGKSDFSWLSRKSADKITPWNFDEIVDKESSAEAFINRMTNYDLYLPNQKVLPRHSLLYEKFTVYNELTKVKYKTEQGKTAFFDANMKQEIFDGVFKVYRKVTKDKLMDFLEKEFDEFRIVDLTGLDKENKAFNASYGTYHDLRKILDKDFLDNSKNEKILEDIVLTLTLFEDREMIRKRLENYSDLLTKEQVKNLERRHYTGWGRLSAELIHGIRNKESRKTILDYLIDDGNSNRNFMQLINDDALSFKEEIAKAQVIGETDNLNQVVSDIAGSPAIKKGILQSLKIVDELVKIMGHQPENIVVEMARENQFTNQGRRNSQQRLKGLTDSIKEFGSQILKEHPVENSQLQNDRLFLYYLQNGRDMYTGEELDIDYLSQYDIDHIIPQAFIKDNSIDNRVLTSSKENRGKSDDVPSKDVVRKMKSYWSKLLSAKLITQRKFDNLTKAERGGLTDDDKAGFIKRQLVETRQITKHVARILDERFNTETDENNKKIRQVKIVTLKSNLVSNFRKEFELYKVREINDYHHAHDAYLNAVIGKALLGVYPQLEPEFVYGDYPHFHGHKENKATAKKFFYSNIMNFFKKDDVRTDKNGEIIWKKDEHISNIKKVLSYPQVNIVKKVEEQTGGFSKESILPKGNSDKLIPRKTKKFYWDTKKYGGFDSPIVAYSILVIANIEKGKSKKLKLVKDLVGITIMERTIFEKNPVAFLERKGYRNVQEENIVKLPKYSLFELENGRRRLLASARELQKGNEIVLPNHLGTMLYHAKNIHKVDEPKHLDYVKKHKDEFKELLDVVSNFSKKNILAESNLEKIEELYAQNNNKDITELASSFINLLTFTAIGAPAAFKFFDNNIDRKRYTSTTEILNATLIHQSITGLYETRIDLSRLGGD

SEQ ID NO: 120 - protein, 1333 aa, Streptococcus massiliensis
MKKPYSIGLDIGTNSVGWAVVMEDYKVPSKKMKVLGNTDKQSIKKNLIGALLFDSGETAVERRLNRTTSRRYDRRRNRIRYLQHIFAEEMNRADENFFHRLKESFFVEEDKTYSKYPIFGTLEEEKNYHKNYPTIYHLRKTLADTPDKMDIRLIYLALAHIIKYRGHFLIEGDLDIENIGIQDSFKSFIEEYNTQFGTKLDSTTKVEAIFTENSSKAKRVETILGLFPDETAAGNLDKFLKLMLGNQADFKKVFDLEEKITLQFSKDSYEEDLELLLSKIDEEYAALFDLAKKVYDAVLLSNILTVKEKNTKAPLSASMIKRYEEHKDDLKAFKRFFRERLPEKYETMFKDLTKPSYAAYVSGAVTEDDFYKFSKGLLIDVEGAEYFLEKIEREDFLRKQRTFDNGAIPNQVHVKELQAIILNQSKYYPFLAENKEKIEKILTFRIPYYVGPLARGNSSFAWLQRKSDEAIRPWNFEQVVDMETSASRFIERMTLHDLYLPDEKVLPRHSLIYEKYTVFNELTKVRFTPEGGKEVYFSKTDKENIFDSLFKRYRKVTKRKLKDFIEKELGYGYIDIDNIKGVEEQFNASYTTYQDLLKIIGDKEFLDNEENKDLLEEIIYILTVFEDRKMIEKRLSELNIPFENKIIKKLARKKYTGWGNLSRKLIDGIRNRETNRTILGHLIDDGFSNRNLMQLINDDGLDFKEIIRKAQTIENIDTNQALVSSLPGSPAIKKGILQSLNIVDEIIAIMGYAPTNIVIEMARENQTTQKGRDNSAQRLKKIEDGIKLGSDLLKQNPIQDNKDLQKEKLFLYYMQNGIDLYTGQPLNCDPDSLAFYDVDHIVPRSYIKNDSFDNKVLTTSKGNRKKLDDVPAKEVVEKMENTWRRLHAAGLISDIKLSYLMKGELTEEDKAGFIRRQLVETRQITKHVARLLDEKLNRKKNENGEKLRTTKIITLKSVFASRFRANFDLYKLRELNHYHHAHDAYLNAVVAQALLKVYPKFERELVYGSYVKESIFSRKATERMRMYNNILKFISKDKKDQETGEIVWDKKEIENIVKKVIYSSPVNIVKKREEQSGALFKQSNMAVGYNNKLIPRKKDWSVDKYGGFIEPAESYSLAIFYTDINGKKPKKKSTIIAISRMEKKDYEKEPERFLAQKGFERVEKTIKLPKYSLFEMEKGRRRLLASSGELQKGNQVLLPEHLIRLLSYAKKVDVLVKSKDDDYDLEEHRAEFAELLDCIKKFNDMYILASSNMSKIEEIYQKNIDAPIEEVARSFVLLNFTMMGAATDFKFFGQIIPRKRYPSTTECLKSTLIHQSVTGLYETRIDLSKLGEN

SEQ ID NO: 121 - protein, 1361 aa, Streptococcus mitis
NNKPYSIGLDIGTNSVGWAVITDDYKVPSKKMKVLGNTDKHFIKKNLLGALLFDEGTTAEDRRLKRTARRRYTRRKNRLRYLQEIFTEEMSKVDISFFHRLDDSFLVPEDKRGSKYPIFATLEEEKEYHKNFPTIYHLRKHLADSKEKADFRLIYLALAHIIKYRGHFLYEESFDIKNNDIQKIFNEFISIYDNTFEGSSLNGQNAQVEAIFTDKISKSAKRERVLKLFPDEKSTGLFSEFLKLIVGNQADFKKHFDLEEKAPLQFSKDTYDEDLENLLVQIGDDFADLFLVAKKLYDAILLSGILTVTDPSTKAPLSASMIDRYENHQKDLAALKQFIKTNLPEKYDEVFSDQSKDGYAGYIDGKTTQEAFYKYIKNLLSKLEGADYFLDKIEREDFLRKQRTFDNGSIPHQIHLQEMNAIIRRQGEHYPFLQENKEKIEKILTFRIPYYVGPLARGNRDFAWLTRNSDQAIRPWNFEEIVDKARSAEDFINKMTNYDLYLPEEKVLPKHSLLYETFAVYNELTKVKFIAEGLRDYQFLDSGQKQQIVTQLFKEKRKVTEKDIIQYLHNVDSYDGIELKGIEKQFNASLSTYHDLLKIIKDKEFMDDSKNEAILENIVHTLTIFEDREMIKQRLAHYASIFDEKVIKALTRRHYTGWGKLSAKLINGIYDKQSKKTILDYLIDDGEINRNFMQLINDDGLSFKEIIQKAQVVGKTNDVKQVVQELPGSPAIKKGILQSIKLVDELVKVMGHAPESIVIEMARENQTTARGKKNSQQRYKRIEDALKNLAHNILKEHPTDNIQLQNDRLFLYYLQNGKDMYTGKSLDINQLSSCDIDHIIPQAFIKDDSLDNRVLTSSKDNRGKSDNVPSLEIVQKRKAFWQQLLDSKLISERKFNNLTKAERGGLDERDKVGFIKRQLVETRQITKHVAQILDARFNTEVTEKDKKDRSVKIITLKSNLVSNFRKEFRLYKVREINDYHHAHDPYLNAVVAKAILKKYPKLEPEFVYGDYQKYDLTKDPKEVEKATEKYFFYSNLLNFFKEEVHYADGTIVKRENIEYSKDTGEIAWNKEKDFATIKKVLSLPQVNIVKKTEEQTGGLFDNNIVSKKKVVDASKLTPIKSGLSPEKYGGYARPTIAYSVLVIADIEKGKAKKLKRIKEMVGITVQDKKKFEANPIAYLEECGYKNINPNLIIKLPKYSLFEFNNGQRRLLASSIELQKGNELIVPYHFTALLYHAQRINKISEPIHKQYVETHQSEFKELLTAIISLSKKYIQKPNVESLLQQAFDQSDKDIYQLSESFISLLKLISFGAPGTFKFLGVEISQSNVRYQSVSSCFNATLIHQSITGLYETRIDLSKLGED

SEQ ID NO: 122 - protein, 1359 aa, Streptococcus mitis; identical to SEQ ID NO: 12

SEQ ID NO: 123 - protein, 1345 aa, Streptococcus mutans
MKKPYSIGLDIGTNSVGWAVVTDDYKVPAKKMKVLGNTDKSHIEKNLLGALLFDSGNTAEDRRLKRTARRRYTRRRNRILYLQEIFSEEMGKVDDSFFHRLEDSFLVTEDKRGERHPIFGNLEEEVKYHENFPTIYHLRQYLADNPEKVDLRLVYLALAHIIKFRGHFLIEGKFDTRNNDVQRLFQEFLAVYDNTFENSSLQEQNVQVEEILTDKISKSAKKDRVLKLFPNEKSNGRFAEFLKLIVGNQADFKKHFELEEKAPLQFSKDTYEEELEVLLAQIGDNYAELFLSAKKLYDSILLSGILTVTDVGTKAPLSASMIQRYNEHQMDLAQLKQFIRQKLSDKYNEVFSDVSKDGYAGYIDGKTNQEAFYKYLKGLLNKIEGSGYFLDKIEREDFLRKQRTFDNGSIPHQIHLQEMRAIIRRQAEFYPFLADNQDRIEKLLTFRIPYYVGPLARGKSDFAWLSRKSADKITPWNFDEIVDKESSAEAFINRMTNYDLYLPNQKVLPKHSLLYEKFTVYNELTKVKYKTEQGKTAFFDANMKQEIFDGVFKVYRKVTKDKLMDFLEKEFDEFRIVDLTGLDKENKVFNASYGTYHDLCKILDKDFLDNSKNEKILEDIVLTLTLFEDREMIRKRLENYSDLLTKEQVKKLERRHYTGWGRLSAELIHGIRNKESRKTILDYLIDDGNSNRNFMQLINDDALSFKEEIAKAQVIGETDNLNQVVSDIAGSPAIKKGILQSLKIVDELVKIMGHQPENIVVEMARENQFTNQGRRNSQQRLKGLTDSIKEFGSQILKEHPVENSQLQNDRLFLYYLQNGRDMYTGEELDIDYLSQYDIDHIIPQAFIKDNSIDNRVLTSSKENRGKSDDVPSKDVVRKMKSYWSKLLSAKLITQRKFDNLTKAERGGLTDDDKAGFIKRQLVETRQITKHVARILDERFNTETDENNKKIRQVKIVTLKSNLVSNFRKEFELYKVREINDYHHAHDAYLNAVIGKALLGVYPQLEPEFVYGDYPHFHGHKENKATAKKFFYSNIMNFFKKDDVRTDKNGEIIWKKDEHISNIKKVLSYPQVNIVKKVEEQTGGFSKESILPKGNSDKLIPRKTKKFYWDTKKYGGFDSPIVAYSILVIADIEKGKSKKLKTVKALVGVTIMEKMTFERDPVAFLERKGYRNVQEENIIKLPKYSLFKLENGRKRLLASARELQKGNEIVLPNHLGTLLYHAKNIHKVDEPKHLDYVDKHKDEFKELLDVVSNFSKKYTLAEGNLEKIKELYAQNNGEDLKELASSFINLLTFTAIGAPATFKFFDKNIDRKRYTSTTEILNATLIHQSITGLYETRIDLNKLGGD

SEQ ID NO: 124 - protein, 1345 aa, Streptococcus mutans
MKKPYSIGLDIGTNSVGWAVVTDDYKVPAKKMKVLGNTDKSHIEKNLLGALLFDSGNTAEDRRLKRTARRRYTRRRNRILYLQEIFSEEMGKVDDSFFHRLEDSFLVTEDKRGERHPIFGNLEEEVKYHENFPTIYHLRQYLADNPEKVDLRLVYLALAHIIKFRGHFLIEGKFDTRNNDVQRLFQEFLAVYDNTFENSSLQEQNVQVEEILTDKISKSAKKDRVLKLFPNEKSNGRFAEFLKLIVGNQADFKKHFELEEKAPLQFSKDTYEEELEVLLAQIGDNYAELFLSAKKLYDSILLSGILTVTDVGTKAPLSASMIQRYNEHQMDLAQLKQFIRQKLSDKYNEVFSDVSKDGYAGYIDGKTNQEAFYKYLKGLLNKIEGSGYFLDKIEREDFLRKQRTFDNGSIPHQIHLQEMRAIIRRQAEFYPFLADNQDRIEKLLTFRIPYYVGPLARGKSDFAWLSRKSADKITPWNFDEIVDKESSAEAFINRMTNYDLYLPNQKVLPKHSLLYEKFTVYNELIKVKYKTEQGKTAFFDANMKQEIFDGVFKVYRKVTKDKLMDFLEKEFDEFRIVDLTGLDKENKVFNASYGTYHDLCKILDKDFLDNSKNEKILEDIVLTLTLFEDREMIRKRLENYSDLLTKEQVKKLERRHYTGWGRLSAELIHGIRNKESRKTILDYLIDDGNSNRNFMQLINDDALSFKEEIAKAQVIGETDNLNQVVSDIAGSPAIKKGILQSLKIVDELVKIMGHQPENIVVEMARENQFTNQGRRNSQQRLKGLTDSIKEFGSQILKEHPVENSQLQNDRLFLYYLQNGRDMYTGEELDIDYLSQYDIDHIIPQAFIKDNSIDNRVLTSSKENRGKSDDVPSKDVVRKMKSYWSKLLSAKLITQRKFDNLTKAERGGLTDDDKAGFIKRQLVETRQITKHVARILDERFNTETDENNKKIRQVKIVTLKSNLVSNFRKEFELYKVREINDYHHAHDAYLNAVIGKALLGVYPQLEPEFVYGDYPHFHGHKENKATAKKFFYSNIMNFFKKDDVRTDKNGEIIWKKDEHISNIKKVLSYPQVNIVKKVEEQTGGFSKESILPKGNSDKLIPRKTKKFYWDTKKYGGFDSPIVAYSILVIADIEKGKSKKLKTVKALVGVTIMEKMTFERDPVAFLERKGYRNVQEENIIKLPKYSLFKLENGRKRLLASARELQKGNEIVLPNHLGTLLYHAKNIHKVDEPKHLDYVDKHKDEFKELLDVVSNFSKKYTLAEGNLEKIKELYAQNNGEDLKELASSFINLLTFTAIGAPATFKFFDKNIDRKRYTSTTEILNATLIHQSITGLYETRIDLNKLGGD

SEQ ID NO: 125 - protein, 1345 aa, Streptococcus mutans
MKKPYSIGLDIGTNSVGWAVVTDDYKVPAKKMKVLGNTDKSHIKKNLLGALLFDSGNTAEDRRLKRTARRRYTRRRNRILYLQEIFSEEMGKVDDSFFHRLDESFLTDDDKNFDSYPIFGNKAEEDAYHQKFPTIYHLRKHLADSTEKADLRLVYLALAHMIKFRGHFLIEGELNAENTDVQKLFADFVGVYDRTFDDSHLSEITVDASSILTEKISKSRRLEKLINNYPKEKKNTLFRNLVALSLGLQPNFKTNFKLSEDAKLQFSKDTYEEDLEELLGKIGDDYADLFTLAKNLYDAILLSGILTADDSSTKAPLSASMIKRYAEHHEDLEKLKEFIKANKPELYHDIFKDETKNGYAGYIENGVKQDEFYKYLKNTLSKIAGSDYFLDKIEREDFLRKQRTFDNGSIPHQIHLQEMHAILRRQGDYYPFLKENQDRIEKILTFRIPYYVGPLARGKSDFAWLSRKSADKITPWNFDEIVDKESSVEAFINRMTNYDLYLPNQKVLPKHSLLYEKFTVYNELTKVKYKTEQGKTAFFDANMKQEIFDGVFKVYRKVTKDKLMDFLEKEFDEFRIVDLTGLDKENKAFNASYGTYHDLRKILDKDFLDNSKNEKILEDIVLTLTLFEDREMIRKRLKNYSDLLTKEQLKKLERRHYTGWGRLSAELIHGIRNKESRKTILDYLIDDGNSNRNFMQLINDDALSFKEEIAKAQVIGETDNLNQVVSDIAGSPAIKKGILQSLKIVDELVKIMGHQPENIVVEMARENQFTNQGRRNSQQRLKGLTDSIKEFGSQILKEHPVENSQLQNDRLFLYYLQNGRDMYTGEELDIDYLSQYDIDHIIPQAFIKDNSIDNRVLTSSKENRGKSDDVPSKDVVRKMKSYWSKLLSAKLITQRKFDNLTKGERGGLTDDDKAGFIKRQLVETRQITKHVARILDERFNTETDENNKKIRQVKIVTLKSNLVSNFRKEFELYKVREINDYHHAHDAYLNAVIGKALLGVYPQLEPEFVYGDYPHFHGHKENKATAKKFFYSNIMNFFKKDDVRTDKNGEIIWKKDEYISNIKKVLSYPQVNIVKKVEEQTGGFSKESILPKGDSDKLIPRKTKKFYWDTKKYGGFDSPIVAYSILVIADIEKGKSKKLKTVKALVGVTIMEKMTFERDPVAFLERKGYRNVQEENIIKLPKYSLFKLENGRKRLLASARELQKGNEIVLPNHLGTLLYHAKNIHKVDEPKHLDYVDKHKDEFKELLDVVSNFSKKYTLAEGNLEKIKELYAQNNGEDLKELASSFINLLTFTAIGAPATFKFFDKNIDRKRYTSTTEILNATLIHQSITGLYETRIDLSKLGGD

SEQ ID NO: 126 - protein, 1345 aa, Streptococcus mutans
MKKPYSIGLDIGTNSVGWAVVTDDYKVPAKKMKVLGNTDKSHIKKNLLGALLFDSGNTAEDRRLKRTARRRYTRRRNRILYLQEIFSEEMGKVDDSFFHRLEDSFLVTEDKRGERHPIFGNLEEEVKYHENFPTIYHLRQYLADNPEKTDLRLVYLALAHIIKFRGHFLIEGKFDTRNNDVQRLFQEFLAVYDNTFENSSLQEQNVQVEEILTDKISKSAKKDRVLKLFPNEKSNGRFAEFLKLIVGNQADFKKHFELEEKAPLQFSKDIYEEELEVLLAQIGDNYAELFLSAKKLYDSILLSGILTVTDVSTKAPLSASMIQRYNEHQMDLAQLKQFIRQKLSDKYNEVFSDVSKDGYAGYIDGKTNQEAFYKYLKGLLNKIEGSGYFLDKIEREDFLRKQRTFDNGSIPHQIHLQEMRAIIRRQAEFYPFLADNQDRIEKILTFRIPYYVGPLARGKSDFAWLSRKSADKITPWNFDEIVDKESSVEAFINRMTNYDLYLPNQKVLPKHSLLYEKFTVYNELTKVKYKTEQGKTAFFDANMKQEIFDGVFKVYRKVTKDKLMDFLEKEFDEFRIVDLTGLDKENKAFNASYGTYHDLRKILDKDFLDNSKNEKILEDIVLTLTLFEDREMIRKRLKNYSDLLTKEQLKKLERRHYTGWGRLSAELIHGIRNKESRKTILDYLIDDGNSNRNFMQLINDDALSFKEEIAKAQVIGETDNLNQVVSDIAGSPAIKKGILQSLKIVDELVKIMGHQPENIVVEMARENQFTNQGRRNSQQRLKGLTDSIKEFGSQILKEHPVENSQLQNDRLFLYYLQNGRDMYTGEELDIDYLSQYDIDHIIPQAFIKDNSIDNRVLTSSKENRGKSDDVPSKDVVRKMKSYWSKLLSAKLITQRKFDNLTKAERGGLTDDDKAGFIKRQLVETRQITKHVARILDERFNTETDENNKKIRQVKIVTLKSNLVSNFRKEFELYKVREINDYHHAHDAYLNAVIGKALLGVYPQLEPEFVYGDYPHFHGHKENKATAKKFFYSNIMNFFKKDDVRTDKNGEIIWKKDEHISNIKKVLSYPQVNIVKKVEEQTGGFSKESILPKGNSDKLIPRKTKKFYWDTKKYGGFDSPIVAYSILVIADIEKGKSKKLKTVKALVGVTIMEKMTFERDPVAFLERKGYRNVQEENIIKLPKYSLFKLENGRKRLLASARELQKGNEIVLPNHLGTLLYHAKNIHKVDEPKHLDYVDKHKDEFKELLDVVSNFSKKYTLAEGNLEKIKELYAQNNGEDLKELASSFINLLTFTAIGAPATFKFFDKNIDRKRYTSTTEILNATLIHQSITGLYETRIDLNKLGGD

SEQ ID NO: 127 - protein, 1345 aa, Streptococcus mutans
MKKPYSIGLDIGTNSVGWAVVTDDYKVPAKKMKVLGNTDKSHIKKNLLGALLFDSGNTAEDRRLKRTARRRYTRRRNRILYLQEIFSEEMGKVDDSFFHRLEDSFLVTEDKRGERHPIFGNLEEEVKYHENFPTIYHLRQYLADNPEKVDLRLVYLALAHIIKFRGHFLIEGKFDTRNNDVQRLFQEFLAVYDNTFENSSLQEQNVQVEEILTDKISKSAKKDRVLKLFPNEKSNGRFAEFLKLIVGNQADFKKHFELEEKAPLQFSKDTYEEELEVLLAQIGDNYAELFLSAKKLYDSILLSGILTVTDVSTKAPLSASMIQRYNEHQMDLAQLKQFIRQKLSDKYNEVFSDVSKDGYAGYIDGKTNQEAFYKYLKGLLNKIEGSGYFLDKIEREDFLRKQRTFDNGSIPHQIHLQEMRAIIRRQAEFYPFLADNQDRIEKILTFRIPYYVGPLARGKSDFAWLSRKSADKITPWNFDEIVDKESSAEAFINRMTNYDLYLPNQKVLPKHSLLYEKFTVYNELTKVKYKTEQGKTAFFDANMKQEIFDGVFKVYRKVTKDKLMDFLEKEFDEFRIVDLTGLDKENKVFNASYGTYHDLCKILDKDFLDNSKNEKILEDIVLTLTLFEDREMIRKRLENYSDLLTKEQVKKLERRHYTGWGRLSAELIHGIRNKESRKTILDYLIDDGNSNRNFMQLINDDALSFKEEIAKAQVIGETDNLNQVVSDIAGSPAIKKGILQSLKIVDELVKIMGHQPENIVVEMARENQFTNQGRQNSQQRLKGLTDSIKEFGSQILKEHPVENSQLQNDRLFLYYLQNGRDMYTGEELDIDYLSQYDIDHIIPQAFIKDNSIDNRVLTSSKENRGKSDDVPSEDVVRKMKSYWSKLLSAKLITQRKFDNLTKAERGGLTDDDKAGFIKRQLVETRQITKHVARILDERFYTETDENNKKIRQVKIVTLKSNLVSNFRKEFELYKVREINDYHHAHDAYLNAVIGKALLGVYPQLEPEFVYGDYPHFHGHKENKATAKKFFYSNIMNFFKKDDVRTDKNGEIIWKKDEHISNIKKVLSYPQVNIVKKVEEQTGGFSKESILPKGNSDKLIPRKTKKFYWDTKKYGGFDSPIVAYSILVIADIEKGKSKKLKTVKALVGVTIMEKMTFERDPVAFLERKGYRNVQEENIIKLPKYSLFKLENGRKRLLASARELQKGNEIVLPNHLGTLLYHAKNIHKVDEPKHLDYVDKHKDEFKELLDVVSNFSKKYTLAEGNLEKIKELYAQNNGEDLKELASSFINLLTFTAIGAPATFKFFDKNIDRKRYTSTTEILNATLIHQSITGLYETRIDLSKLGGD

SEQ ID NO: 128 - protein, 1345 aa, Streptococcus mutans
MKKPYSIGLDIGTNSVGWAVVTDDYKVPAKKMKVLGNTDKSHIKKNLLGALLFDSGNTAEDRRLKRTARRRYTRRRNRILYLQEIFSEEMGKVDDSFFHRLEDSFLVTEDKRGERHPIFGNLEEEVKYHENFPTIYHLRQYLADNPEKVDLRLVYLALAHIIKFRGHFLIEGKFDTRNNDVQRLFQEFLAVYDNTFENSSLQEQNVQVEEILTDKISKSAKKDRVLKLFPNEKSNGRFAEFLKLIVGNQADFKKHFELEEKAPLQFSKDTYEEDLEELLGKIGDDYADLFTLAKNLYDAILLSGILTADDSSTKAPLSASMIQRYNEHQMDLAQLKQFIRQKLSDKYNEVFSDVSKDGYAGYIDGKTNQEAFYKYLKGLLNKIEGSGYFLDKIEREDFLRKQRTFDNGSIPHQIHLQEMRAIIRRQAEFYPFLADNQDRIEKILTFRIPYYVGPLARGKSDFAWLSRKSADKITPWNFDEIVDKESSAEAFINRMTNYDLYLPNQKVLPKHSLLYEKFTVYNELTKVKYKTEQGKTAFFDANMKQEIFDGVFKVYRKVTKDKLMDFLEKEFDEFRIVDLTGLDKENKVFNASYGTYHDLCKILDKDFLDNSKNEKILEDIVLTLTLFEDREMIRKRLENYSDLLTKEQVKKLERRHYTGWGRLSAELIHGIRNKESRKTILDYLIDDGNSNRNFMQLINDDALSFKEEIAKAQVIGETDNLNQVVSDIAGSPAIKKGILQSLKIVDELVKIMGHQPENIVVEMARENQFTNQGRRNSQQRLKGLTDSIKEFGSQILKEHPVENSQLQNDRLFLYYLQNGRDMYTGEELDIDYLSQYDIDHIIPQAFIKDNSIDNRVLTSSKENRGKSDDVPSKDVVRKMKSYWSKLLSAKLITQRKFDNLTKAERGGLTDDDKAGFIKRQLVETRQITKHVARILDERFYTETDENNKKIRQVKIVTLKSNLVSNFRKEFELYKVREINDYHHAHDAYLNAVIGKALLGVYPQLEPEFVYGDYPHFHGHKENKATAKKFFYSNIMNFFKKDDVRTDKNGEIIWKKDEHISNIKKVLSYPQVNIVKKVEEQTGGFSKESILPKGNSDKLIPRKTKKFYWDTKKYGGFDSPIVAYSILVIADIEKGKSKKLKTVKALVGVTIMEKMTFERDPVAFLERKGYRNVQEENIIKLPKYSLFKLENGRKRLLASARELQKGNEIVLPNHLGTLLYHAKNIHKVDEPKHLDYVDKHKDEFKELLDVVSNFSKKYTLAEGNLEKIKELYAQNNGEDLKELASSFINLLTFTAIGAPATFKFFDKNIDRKRYTSTTEILNATLIHQSITGLYETRIDLSKLGGD

SEQ ID NO: 129 - protein, 1345 aa, Streptococcus mutans
MKKPYSIGLDIGTNSVGWAVVTDDYKVPAKKMKVLGNTDKSHIKKNLLGALLFDSGNTAEDRRLKRTARRRYTRRRNRILYLQEIFSEEMGKVDDSFFHRLEDSFLVTEDKRGERHPIFGNLEEEVKYHENFPTIYHLRQYLADNPEKVDLRLVYLALAHIIKFRGHFLIEGKFDTRNNDVQRLFQEFLAVYDNTFENSSLQEQNVQVEEILTDKISKSAKKDRVLKLFPNEKSNGRFAEFLKLIVGNQADFKKHFELEEKAPLQFSKDTYEEDLEELLGKIGDDYADLFTLAKNLYDAILLSGILTADDSSTKAPLSASMIQRYNEHQMDLAQLKQFIRQKLSDKYNEVFSDVSKDGYAGYIDGKTNQEAFYKYLKGLLNKIEGSGYFLDKIEREDFLRKQRTFDNGSIPHQIHLQEMRAIIRRQAEFYPFLADNQDRIEKILTFRIPYYVGPLARGKSDFAWLSRKSADKITPWNFDEIVDKESSAEAFINRMTNYDLYLPNQKVLPKHSLLYEKFTVYNELTKVKYKTEQGKTAFFDANMKQEIFDGVFKVYRKVTKDKLMDFLEKEFDEFRIVDLTGLDKENKVFNASYGTYHDLCKILDKDFLDNSKNEKILEDIVLTLTLFEDREMIRKRLENYSDLLTKEQVKKLERRHYTGWGRLSAELIHGIRNKESRKTILDYLIDDGNSNRNFMQLINDDALSFKEEIAKAQVIGETDNLNQVVSDIAGSPAIKKGILQSLKIVDELVKIMGHQPENIVVEMARENQFTNQGRRNSQQRLKGLTDSIKEFGSQILKEHPVENSQLQNDRLFLYYLQNGRDMYTGEELDIDYLSQYDIDHIIPQAFIKDNSIDNRVLTSSKENRGKSDDVPSKDVVRKMKPYWSKLLSAKLITQRKFDNLTKAERGGLTDDDKAGFIKRQLVETRQITKHVARILDERFNTETDENNKKIRQVKIVTLKSNLVSNFRKEFELYKVREINDYHHAHDAYLNAVIGKALLGVYPQLEPEFVYGDYPHFHGHEENKATAKKFFYSNIMNFFKKDDVRTDKNGEIIWKKDEHISNIKKVLSYPQVNIVKKVEEQTGGFSKESILPKGNSDKLIPRKTKKFYWDTKKYGGFDSPIVAYSILVIADIEKGKSKKLKTVKALVGVTIMEKMTFERDPVAFLERKGYRNVQEENIIKLPKYSLFKLENGRKRLLASARELQKGNEIVLPNHLGTLLYHAKNIHKVDEPKHLDYVDKHKDEFKELLDVVSNFSKKYTLAEGNLEKIKELYAQNNGEDLKELASSFINLLTFTAIGAPATFKFFDKNIDRKRYTSTTEILNATLIHQSITGLYETRIDLSKLGGD

SEQ ID NO: 130 - protein, 1345 aa, Streptococcus mutans
MKKPYSIGLDIGTNSVGWAVVTDDYKVPAKKMKVLGNTDKSHIKKNLLGALLFDSGNTAEDRRLKRTARRRYTRRRNRILYLQEIFSEEMGKVDDSFFHRLEDSFLVTEDKRGERHPIFGNLEEEVKYHENFPTIYHLRQYLADNPEKVDLRLVYLALAHIIKFRGHFLIEGKFDTRNNDVQRLFQEFLAVYDNTFENSSLQEQNVQVEEILTDKISKSAKKDRVLKLFPNEKSNGRFAEFLKLIVGNQADFKKHFELEEKAPLQFSKDTYEEELEVLLAQIGDNYAELFLSAKKLYDSILLSGILTVTDVSTKAPLSASMIQRYNEHQMDLAQLKQFIRQKLSDKYNEVFSDVSKDGYAGYIDGKTNQEAFYKYLKGLLNKIEGSGYFLDKIEREDFLRKQRTFDNGSIPHQIHLQEMRAIIRRQAEFYPFLADNQDRIEKILTFRIPYYVGPLARGKSDFAWLSRKSADKITPWNFDEIVDKESSAEAFINRMTNYDLYLPNQKVLPKHSLLYEKFTVYNELTKVKYKTEQGKTAFFDANMKQEIFDGVFKVYRKVTKDKLMDFLEKEFDEFRIVDLTGLDKENKVFNASYGTYHDLCKILDKDFLDNSKNEKILEDIVLTLTLFEDREMIRKRLENYSDLLTKEQVKKLERRHYTGWGRLSAELIHGIRNKESRKTILDYLIDDGNSNRNFMQLINDDALSFKEEIAKAQVIGETDNLNQVVSDIAGSPAIKKGILQSLKIVDELVKIMGHQPENIVVEMARENQFTKQGRRNSQQRLKGLTDSIKEFGSQILKEHPVENSQLQNDRLFLYYLQNGRDMYTGEELDIDYLSQYDIDHIIPQAFIKDNSIDNRVLTSSKENRGKSDDVPSKDVVRKMKSYWSKLLSAKLITQRKFDNLTKAERGGLTDDDKAGFIKRQLVETRQITKHVARILDERFYTETDENNKKIRQVKIVTLKSNLVSNFRKEFELYKVREINDYHHAHDAYLNAVIGKALLGVYPQLEPEFVYGDYPHFHGHKENKATAKKFFYSNIMNFFKKDDVRTDKNGEIIWKKDEHISNIKKVLSYPQVNIVKKVEEQTGGFSKESILPKGNSDKLIPRKTKKFYWDTKKYGGFDSPIVAYSILVIADIEKGKSKKLKTVKALVGVTIMEKMTFERDPVAFLERKGYRNVQEENIIKLPKYSLFKLENGRKRLLASARELQKGNEIVLPNHLGTLLYHAKNIHKVDEPKHLDYVDKHKDEFKELLDVVSNFSKKYTLAEGNLEKIKELYAQNNGEDLKELASSFINLLTFTAIGAPATFKFFDKNIDRKRYTSTTEILNATLIHQSITGLYETRIDLSKLGGD

SEQ ID NO: 131 - protein, 1345 aa, Streptococcus mutans
MKKPYSIGLDIGTNSVGWAVVTDDYKVPAKKMKVLGNTDKSHIKKNLLGALLFDSGNTAADRRLKRTARRRYTRRRNRILYLQEIFAEEMSKVDDSFFHRLEDSFLVTEDKRGERHPIFGNLEEEVKYHENFPTIYHLRQYLADNPEKVDLRLVYLALAHIIKFRGHFLIEGKFDTRNNDVQRLFQEFLAVYDNTFENSSLQEQNVQVEEILTDKISKSAKKDRVLKLFPNEKSNGRFAEFLKLIVGNQADFKKHFELEEKAPLQFSKDTYEEELEVLLTQIGDNYAELFLSAKKLYDSILLSGILTVTDVSTKAPLSASMIQRYNEHQMDLAQLKQFIRQKLSDKYNEVFSDVSKDGYAGYIDGKTNQEAFYKYLKGLLNKIEGSGYFLDKIEREDFLRKQRTFDNGSIPHQIHLQEMRAIIRRQAEFYPFLADNQDRIEKILTFRIPYYVGPLARGKSDFAWLSRKSADKITPWNFDEIVDKESSAEAFINRMTNYDLYLPNQKVLPKHSLLYEKFTVYNELTKVKYKTEQGKTAFFDANMKQEIFDGVFKVYRKVTKDKLMDFLEKEFDEFRIVDLTGLDKENKAFNASYGTYHDLRKILDKDFLDNSKNEKILEDIVLTLTLFEDREMIRKRLENYSDLLTKEQVKKLERRHYTGWGRLSAELIHGIRNKESRKTLLDYLIDDGNSNRNFMQLINDDALSFKEEIAKAQVIGETDNLNQVVSDIAGSPAIKKGILQSLKIVDELVKIMGHQPENIVVEMARENQFTNQGRRNSQQRLKGLTDSIKEFGSQILKEHPVENSQLQNDRLFLYYLQNGRDMYTGEELDIDYLSQYDIDHIIPQAFIKDNSIDNRVLTSSKENRGKSDDVPSKDVVRKMKPYWSKLLSAKLITQRKFDNLTKAERGGLTDDDKAGFIKRQLVETRQITKHVARILDERFNTETDENNKKIRQVKIVTLKSNLVSNFRKEFELYKVREINDYHHAHDAYLNAVIGKALLGVYPQLEPEFVYGDYPHFHGHEENKATAKKFFYSNIMNFFKKDDVRTDKNGEIIWKKDEHISNIKKVLSYPQVNIVKKVEEQTGGFSKESILPKGNSDKLIPRKTKKFYWDTKKYGGFDSPIVAYSILVIADIEKGKSKKLKTVKALVGVTIMEKMTFERDPVAFLERKGYRNVQEENIIKLPKYSLFKLENGRKRLLASARELQKGNEIVLPNHLGTLLYHAKNIHKVDEPKHLDYVDKHKDEFKELLDVVSNFSKKYTLAEGNLEKIKELYAQNNGEDLKELSSSFINLLTFTAIGAPAAFKFFDKNIDRKRYTSTTEILNATLIHQSITGLYETRIDLSKLGGD

SEQ ID NO: 132 - protein, 1345 aa, Streptococcus mutans
MKKPYSIGLDIGTNSVGWAVVTDDYKVPAKKMKVLGNTDKSHIKKNLLGALLFDSGNTAEDRRLKRTARRRYTRRRNRILYLQEIFSEEMGKVDDSFFHRLEDSFLVTEDKRGERHPIFGNLEEEVKYHENFPTIYHLRQYLADNPEKVDLRLVYLALAHIIKFRGHFLIEGKFDTRNNDVQRLFQEFLAVYDNTFENSSLQEQNVQVEEILTDKISKSAKKDRVLKLFPNEKSNGRFAEFLKLIVGNQADFKKHFELEEKAPLQFSKDTYEEELEVLLAQIGDNYAELFLSAKKLYDSILLSGILTVTDVSTKAPLSASMIQRYNEHQMDLAQLKQFIRQKLSDKYNEVFSDVSKDGYAGYIDGKTNQEAFYKYLKGLLNKIEGSGYFLDKIEREDFLRKQRTFDNGSIPHQIHLQEMRAIIRRQAEFYPFLADNQDRIEKILTFRIPYYVGPLARGKSDFAWLSRKSADKITPWNFDEIVDKESSAEAFINRMTNYDLYLPNQKVLPKHSLLYEKFTVYNELTKVKYKTEQGKTAFFDANMKQEIFDGVFKVYRKVTKDKLMDFLEKEFDEFRIVDLTGLDKENKVFNASYGTYHDLCKILDKDFLDNSKNEKILEDIVLTLTLFEDREMIRKRLENYSDLLTKEQVKKLERRHYTGWGRLSAELIHGIRNKESRKTILDYLIDDGNSNRNFMQLINDDALSFKEEIAKAQVIGETDNLNQVVSDIAGSPAIKKGILQSLKIVDELVKIMGHQPENIVVEMARENQFTKQGRRNSQQRLKGLTDSIKEFGSQILKEHPVENSQLQNDRLFLYYLQNGRDMYTGEELDIDYLSQYDIDHIIPQAFIKDNSIDNRVLTSSKENRGKSDDVPSKDVVRKMKSYWSKLLSAKLITQRKFDNLTKAERGGLTDDDKAGFIKRQLVETRQITKHVARILDERFYTETDENNKKIRQVKIVTLKSNLVSNFRKEFELYKVREINDYHHAHDAYLNAVIGKALLGVYPQLEPEFVYGDYPHFHGHKENKATAKKFFYSNIMNFFKKDDVRTDRNGEIIWKKDEHISNIKKVLSYPQVNIVKKVEEQTGGFSKESILPKGNSDKLIPRKTKKFYWDTKKYGGFDSPIVAYSILVIADIEKGKSKKLKTVKALVGVTIMEKMTFERDPVAFLERKGYRNVQEENIIKLPKYSLFKLENGRKRLLASARELQKGNEIVLPNHLGTLLYHAKNIHKVDEPKHLDYVDKHKDEFKELLDVVSNFSKKYTLAEGNLEKIKELYAQNNGEDLKELASSFINLLTFTAIGAPATFKFFDKNIDRKRYTSTTEILNATLIHQSITGLYETRIDLSKLGGD

SEQ ID NO: 133 - protein, 1336 aa, Streptococcus mutans
MKKSYSIGLDIGTNSVGWAVVTDDYKVPAKKMKVLGNTDKSHIKKNLLGALLFDSGNTAEDRRLKRTARRRYTRRRNRILYLQEIFSEEMGKVDDSFFHRLDESFLTDDDKNFDSHPIFGNKAEEDAYHQKFPTIYHLRKHLADSTEKADLRLVYLALAHMIKFRGHFLIEGELNAENTDVQKLFADFVGVYDRTFDDSHLSEITVDASSILTEKISKSRRLEKLINNYPKEKKNTLFGNLIALSLGLQPNFKTNFKLSEDAKLQFSKDTYEEDLEELLGKIGDDYADLFTLAKNLYDAILLSGILTADDSSTKAPLSASMIKRYAEHHEDLEKLKEFIKANKPELYHDIFKDETKNGYAGYIENGVKQDEFYKYLKNTLSKIAGSDYFLDKIEREDFLRKQRTFDNGSIPHQIHLQEMHAILRRQGDYYPFLKENQDRIEKILTFRIPYYVGPLARKNSRFAWAEYHSDEAVMPWNFDQVIDKESSAQAFIEHMTNNDLYLPNEKVLPKHSPLYEKYTVYNELTKIKYVTEIGEAKFFDANLKQEIFDGLFKHERKVTKKKLRTFLDKNFDEFRIVDIQGLDKETETFNASYATYQDLLKVIKDKVFMDNPENAEILENIVLTLTLFEDREMIKQRLAKYADVFDKKVIDQLARRHYTGWGRLSAKLLNGIRDKQSCKTIMDYLIDDAQSNRNLMQLITDDNLTFKDDIVKAQYVDNSDDLHQVVQSLAGSPAIKKGILQSLKIVDELVKVMGKEPEQIVVEMARENQTTAKGRRNSQQRYKRLKEAIKDLNHKILKEHPTDNQALQNNRLFLYYLQNGRDMYTGESLDINRLSDYDIDHVIPQAFIKDNSIDNRVLTSSKANRGKSDDVPSEDVVNRMRPFWNKLLSSGLISQRKYNNLTKKELTPDDKAGFIKRQLVETRQITKHVARMLDERFNKEFDDNNKRIRRVKIVTLKSNLVSSFRKEFELYKVREINDYHHAHDAYLNAVVVKALLVKYPKLEPEFVYGEYPKYNSYRERKATQKMFFYSNIMNMFKSKVKLADDQIVERPMIEVNDETGEIAWDKTKHITTVKKVLSYPQVNIVKKVEEQTGGLFDPKSPLEKLVPLKKALNPEKYGGYQKPTTAYPILLIVDTKQLIPISVMDKKRFEQNPVKFLKDKGYQQIEKNNFVKLPKYTLVDIGNGIKRLWASSKEVHKGNQLVVSKKSQDLLYHAHHLDNDYSNEYVKNHYQQFDILFNEITSFSKKCKLGKEHIQKIEEAYSKERDSASIEELADGFIKLLGFTQLGATSPFSFLGIKLNQKQYTGKKDYLEATLIHQSITGLYETRIDLNKLGGD

SEQ ID NO: 134 - protein, 1345 aa, Streptococcus mutans
MKKPYSIGLDIGTNSVGWAVVTDDYKVPAKKMKVLGNTDKSHIKKNLLGALLFDSGNTAADRRLKRTARRRYTRRRNRILYLQEIFAEEMSKVDDSFFHRLEDSFLVTEDKRGERHPIFGNLEEEVKYHENFPTIYHLRQYLADNPEKVDLRLVYLALAHIIKFRGHFLIEGKFDTRNNDVQRLFQEFLAVYDNTFENSSLQEQNVQVEEILTDKISKSAKKDRVLKLFPNEKSNGRFAEFLKLIVGNQADFKKHFELEEKAPLQFSKDTYEEELEVLLAQIGDNYAELFLSAKKLYDSILLSGILTVTDVSTKAPLSASMIQRYNEHQMDLAQLKQFIRQKLSDKYNEVFSDVSKDGYAGYIDGKTNQEAFYKYLKGLLNKIEGSGYFLDKIEREDFLRKQRTFDNGSIPHQIHLQEMRAIIRRQAEFYPFLADNQDRIEKILTFRIPYYVGPLARGKSDFAWLSRKSADKITPWNFDEIVDKESSAEAFINRMTNYDLYLPNQKVLPKHSLLYEKFTVYNELTKVKYKTEQGKTAFFDANMKQEIFDGVFKVYRKVTKDKLMDFLEKEFDEFRIVDLTGLDKENKAFNASYGTYHDLRKILDKDFLDNSKNEKILEDIVLTLTLFEDREMIRKRLENYSDLLTKEQVKKLERRHYTGWGRLSAELIHGIRNKESRKTILDYLIDDGNSNRNFMQLINDDALSFKEEIAKAQVIGETDNLNQVVSDIAGSPAIKKGILQSLKIVDELVKIMGHQPENIVVEMARENQFTNQGRRNSQQRLKGLTDSIKEFGSQILKEHPVEHSQLQNDRLFLYYLQNGRDMYTGEELDIDYLSQYDIDHIIPQAFIKDNSIDNRVLTSSKENRGKSDDVPSKNVVRKMKSYWSKLLSAKLITQRKFDNLTKAERGGLTDDDKAGFIKRQLVETRQITKHVARILDERFHTETDENNKKIRQVKIVTLKSNLVSNFRKEFELYKVREINDYHHAHDAYLNAVIGKALLGVYPQLEPEFVYGDYPHFHGHKENKATAKKFFYSNIMNFFKKDDVRTDKNGEIIWKKDEHISNIKKVLSYPQVNIVKKVEEQTGGFSKESILPKGNSDKLIPRKTKKFYWDTKKYGGFDSPIVAYSILVIADIEKGKSKKLKTVKALVGVTIMEKMTFERDPVAFLERKGYRNVQEENIIKLPKYSLFKLENGRKRLLASARELQKGNEIVLPNHLGTLLYHAKNIHKVDEPKHLDYVDKHKDEFKELLDVVSNFSKKYTLAEGNLEKIKELYAQNNGEDLKELASSFINLLTFTAIGAPATFKFFDKNIDRKRYTSTTEILNATLIHQSITGLYETRIDLSKLGGD

SEQ ID NO: 135 - protein, 1345 aa, Streptococcus mutans
MKKPYSIGLDIGTNSVGWAVVTDDYKVPAKKMKVLGNTDKSHIEKNLLGALLFDSGNTAEDRRLKRTARRRYTRRRNRILYLQEIFSEEMGKVDDSFFHRLEDFFLVTEDKRGERHPIFGNLEEEVKYHENFPTIYHLRQYLADNPEKVDLRLVYLALAHIIKFRGHFLIEGKFDTRNNDVQRLFQEFLAVYDNTFENSSLQEQNVQVEEILTDKISKSAKKDRVLKLFPNEKSNGRFAEFLKLIVGNQADFKKHFELEEKAPLQFSKDTYEEELEVLLAQIGDNYAELFLSAKKLYDSILLSGILTADDSSTKAPLSASMIQRYNEHQMDLAQLKQFIRQKLSDKYNEVFSDVSKDGYAGYIDGKTNQEAFYKYLKGLLNKIEGSGYFLDKIEREDFLRKQRTFDNGSIPHQIHLQEMRAIIRRQSEFYPFLADNQDRIEKILTFRIPYYVGPLARGKSDFAWLSRKSADKITPWNFDEIVDKESSAEAFINRMTNYDLYLPNQKVLPKHSLLYEKFTVYNELTKVKYKTEQGETAFFDANMKQEIFDGVFKVYRKVTKDKLMDFLEKEFDEFRIVDLTGLDKENKAFNASYGTYHDLRKILDKDFLDNSKNEKILEDIVLTLTLFEDREMIRKRLKNYSDLLTKEQLKKLERRHYTGWGRLSAELIHGIRNKESRKTILDYLIDDGNSNRNFMQLINDDALSFKEEIAKAQVIGETDNLNQVVSDIAGSPAIKKGILQSLKIVDELVKIMGHQPENIVVEMARENQFTNQGRRNSQQRLKGLTDSIKEFGSQILKEHPVENSQLQNDRLFLYYLQNGRDMYTGEELDIDYLSQYDIDHIIPQAFIKDNSIDNRVLTSSKENRGKSDDVPSKDVVRKMKPYWSKLLSAKLITQRKFDNLTKAERGGLTDDDKAGFIKRQLVETRQITKHVARILDERFNTETDENNKKIRQVKIVTLKSNLVSNFRKEFELYKVREINDYHHAHDAYLNAVIGKALLGVYPQLEPEFVYGDYPHFHGHEENKATAKKFFYSNIMNFFKKDDVRTDKNGEIIWKKDEHISNIKKVLSYPQVNIVKKVEEQTGGFSKESILPKGNSDKLIPRKTKKFYWDTKKYGGFDSPIVAYSILVIADIEKGKSKKLKTVKALVGVTIMEKMTFERDPVAFLERKGYRNVQEENIIKLPKYSLFKLENGRKRLLASARELQKGNEIVLPNHLGTLLYHAKNIHKVDEPKHLDYVDKHKDEFKELLDVVSNFSKKYTLAEGNLEKIKELYAQNNGEDLKELASSFINLLTFTAIGAPATFKFFDKNIDRKRYTSTTEILNATLIHQSITGLYETRIDLSKLGGD

SEQ ID NO: 136 - protein, 1345 aa, Streptococcus mutans
MKKPYSIGLDIGTNSVGWAVVTDDYKVPAKKMKVLGNTDKSHIKKNLLGALLFDSGNTAEDRRLKRTARRRYTRRRNRILYLQEIFSEEMGKVDDSFFHRLDESFLTDDDKNFDSHPIFGNKAEEDAYHQKFPTIYHLRKHLADSTEKADLRLVYLALAHMIKFRGHFLIEGELNAENTDVQKLFADFVGVYDRTFDDSHLSEITVDASSILTEKISKSRRLEKLINNYPKEKKNTLFGNLIALSLGLQPNFKTNFKLSEDAKLQFSKDTYEEELEVLLAQIGDNYAELFLSAKKLYDSILLSGILTVTDVSTKAPLSASMIQRYNEHQMDLAQLKQFIRQKLSDKYNEVFSDVSKDGYAGYIDGKTNQEAFYKYLKGLLNKIEGSGYFLDKIEREDFLRKQRTFDNGSIPHQIHLQEMRAIIRRQAEFYPFLADNQDRIEKILTFRIPYYVGPLARGKSDFAWLSRKSADKITPWNFDEIVDKESSVEAFINRMTNYDLYLPNQKVLPKHSLLYEKFTVYNELTKVKYKTEQGKTAFFDANMKQEIFDGVFKVYRKVTKDKLMDFLEKEFDEFRIVDLTGLDKENKAFNASYGTYHDLRKILDKDFLDNSKNEKILEDIVLTLTLFEDREMIRKRLKNYSDLLTKEQLKKLERRHYTGWGRLSAELIHGIRNKESRKTILDYLIDDGNSNRNFMQLINDDALSFKEEIAKAQVIGETDNLNQVVSDIAGSPAIKKGILQSLKIVDELVKIMGHQPENIVVEMARENQFTNQGRRNSQQRLKGLTDSIKEFGSQILKEHPVENSQLQNDRLFLYYLQNGRDMYTGEELDIDYLSQYDIDHIIPQAFIKDNSIDNRVLTSSKENRGKSDDVPSKDVVRKMKSYWSKLLSAKLITQRKFDNLTKGERGGLTDDDKAGFIKRQLVETRQITKHVARILDERFNTETDENNKKIRQVKIVTLKSNLVSNFRKEFELYKVREINDYHHAHDAYLNAVIGKALLGVYPQLEPEFVYGDYPHFHGHKENKATAKKFFYSNIMNFFKKDDVRTDKNGEIIWKKDEYISNIKKVLSYPQVNIVKKVEEQTGGFSKESILPKGDSDKLIPRKTKKFYWDTKKYGGFDSPIVAYSILVIADIEKGKSKKLKTVKALVGVTIMEKMTFERDPVAFLERKGYRNVQEENIIKLPKYSLFKLENGRKRLLASARELQKGNEIVLPNHLGTLLYHAKNIHKVDEPKHLDYVDKHKDEFKELLDVVSNFSKKYTLAEGNLEKIKELYAQNNGEDLKELASSFINLLTFTAIGAPATFKFFDKNIDRKRYTSTTEILNATLIHQSITGLYETRIDLSKLGGD

SEQ ID NO: 137 - protein, 1345 aa, Streptococcus mutans
MKKPYSIGLDIGTNSVGWAVVTDDYKVPAKKMKVLGNTDKSHIKKNLLGALLFDSGNTAADRRLKRTARRRYTRRRNRILYLQEIFAEEMSKVDDSFFHRLEDSFLVTEDKRGERHPIFGNLEEEVKYHENFPTIYHLRQYLADNPEKVDLRLVYLALAHIIKFRGHFLIEGKFDTRNNDVQRLFQEFLAVYDNTFENSSLQEQNVQVEEILTDKISKSAKKDRVLKLFPNEKSNGRFAEFLKLIVGNQADFKKHFELEEKAPLQFSKDTYEEELEVLLAQIGDNYAELFLSAKKLYDSILLSGILTVTDVSTKAPLSASMIQRYNEHQMDLAQLKQFIRQKLSDKYNEVFSDVSKDGYAGYIDGKTNQEAFYKYLKGLLNKIEGSGYFLDKIEREDFLRKQRTFDNGSIPHQIHLQEMRAIIRRQAEFYPFLADNQDRIEKILTFRIPYYVGPLARGKSDFAWLSRKSADKITPWNFDEIVDKESSAEAFINRMTNYDLYLPNQKVLPKHSLLYEKFTVYNELTKVKYKTEQGKTAFFDANMKQEIFDGVFKVYRKVTKDKLMDFLEKEFDEFRIVDLTGLDKENKVFNASYGTYHDLCKILDKDFLDNSKNEKILEDIVLTLTLFEDREMIRKRLENYSDLLTKEQVKKLERRHYTGWGRLSAELIHGIRNKESRKTILDYLIDDGNSNRNFMQLINDDALSFKEEIAKAQVIGETDNLNQVVSDIAGSPAIKKGILQSLKIVDELVKIMGHQPENIVVEMARENQFTKQGRRNSQQRLKGLTDSIKEFGSQILKEHPVENSQLQNDRLFLYYLQNGRDMYTGEELDIDYLSQYDIDHIIPQAFIKDNSIDNRVLTSSKENRGKSDDVPSKDVVRKMKSYWSKLLSAKLITQRKFDNLTKAERGGLTDDDKAGFIKRQLVETRQITKHVARILDERFYTETDENNKKIRQVKIVTLKSNLVSNFRKEFELYKVREINDYHHAHDAYLNAVIGKALLGVYPQLEPEFVYGDYPHFHGHKENKATAKKFFYSNIMNFFKKDDVRTDKNGEIIWKKDEHISNIKKVLSYPQVNIVKKVEEQTGGFSKESILPKGNSDKLIPRKTKKFYWDTKKYGGFDSPIVAYSILVIADIEKGKSKKLKTVKALVGVTIMEKMTFERDPVAFLERKGYRNVQEENIIKLPKYSLFKLENGRKRLLASARELQKGNEIVLPNHLGTLLYHAKNIHKVDEPKHLDYVDKHKDEFKELLDVVSNFSKKYTLAEGNLEKIKELYAQNNGEDLKELASSFINLLTFTAIGAPATFKFFDKNIDRKRYTSTTEILNATLIHQSITGLYETRIDLSKLGGD

SEQ ID NO: 138 - protein, 1345 aa, Streptococcus mutans
MKKPYSIGLDIGTNSVGWAVVTDDYKVPAKKMKVLGNTDKSHIKKNLLGALLFDSGNTAADRRLKRTARRRYTRRRNRILYLQEIFAEEMSKVDDSFFHRLEDSFLVTEDKRGERHPIFGNLEEEVKYHENFPTIYHLRQYLADNPEKVDLRLVYLALAHIIKFRGHFLIEGKFDTRNNDVQRLFQEFLAVYDNTFENSSLQEQNVQVEEILTDKISKSAKKDRVLKLFPNEKSNGRFAEFLKLIVGNQADFKKHFELEEKAPLQFSKDTYEEELEVLLAQIGDNYAELFLSAKKLYDSILLSGILTVTDVSTKAPLSASMIQRYNEHQMDLAQLKQFIRQKLSDKYNEVFSDVSKDGYAGYIDGKTNQEAFYKYLKGLLNKIEGSGYFLDKIEREDFLRKQRTFDNGSIPHQIHLQEMRAIIRRQAEFYPFLADNQDRIEKILTFRIPYYVGPLARGKSDFAWLSRKSADKITPWNFDEIVDKESSAEAFINRMTNYDLYLPNQKVLPKHSLLYEKFTVYNELTKVKYKTEQGKTAFFDANMKQEIFDGVFKVYRKVTKDKLMDFLEKEFDEFRIVDLTGLDKENKAFNASYGTYHDLRKILDKDFLDNSKNEKILEDIVLTLTLFEDREMIRKRLENYSDLLTKEQVKKLERRHYTGWGRLSAELIHGIRNKESRKTILDYLIDDGNSNRNFMQLINDDALSFKEEIAKAQVIGETDNLNQVVSDIAGSPAIKKGILQSLKIVDELVKIMGHQPENIVVEMARENQFTNQGRRNSQQRLKGLTDSIKEFGSQILKEHPVENSQLQNDRLFLYYLQNGRDMYTGEELDIDYLSQYDIDHIIPQAFIKDNSIDNRVLTSSKENRGKSDDVPSKNVVRKMKSYWSKLLSAKLITQRKFDNLTKAERGGLTDDDKAGFIKRQLVETRQITKHVARILDERFHTETDENNKKIRQVKIVTLKSNLVSNFRKEFELYKVREINDYHHAHDAYLNAVIGKALLGVYPQLEPEFVYGDYPHFHGHKENKATAKKFFYSNIMNFFKKDDVRTDKNGEIIWKKDEHISNIKKVLSYPQVNIVKKVEEQTGGFSKESILPKGNSDKLIPRKTKKFYWDTKKYGGFDSPIVAYSILVIADIEKGKSKKLKTVKALVGVTIMEKMTFERDPVAFLERKGYRNVQEENIIKLPKYSLFKLENGRKRLLASARELQKGNEIVLPNHLGTLLYHAKNIHKVDEPKHLDYVDKHKDEFKELLDVVSNFSKKYTLAEGNLEKIKELYAQNNGEDLKELSSSFINLLTFTAIGAPAAFKFFDKNIDRKRYTSTTEILNATLIHQSITGLYETRIDLSKLGGD

SEQ ID NO: 139 - protein, 1336 aa, Streptococcus mutans
MKKPYSIGLDIGTNSVGWAVVTDDYKVPAKKMKVLGNTDKSHIKKNLLGALLFDSGNTAEDRRLKRTARRRYTRRRNRILYLQEIFAEEMSKVDDSFFHRLDESFLTDDDKNFDSHPIFGNKAEEDAYHQKFPTIYHLRKHLADSTEKADLRLVYLALAHMIKFRGHFLIEGELNAENTDVQKLFADFVGVYDRTFDDSHLSEITVDASSILTEKISKSRRLEKLINNYPKEKKNTLFGNLIALSLGLQPNFKTNFKLSEDAKLQFSKDTYEEDLEELLGKIGDDYADLFTLAKNLYDAILLSGILTADDSSTKAPLSASMIKRYAEHHEDLEKLKEFIKANKPELYHDIFKDETKNGYAGYIENGVKQDEFYKYLKNTLSKITGSDYFLDQIEREDFLRKQRTFDNGSIPHQIHLQEMHAILRRQGDYYPFLKENQDRIEKILTFRIPYYVGPLARKNSRFAWAEYHSDEAVTPWNFDQVIDKESSAQAFIEHMTNNDLYLPNEKVLPKHSPLYEKYTVYNELTKIKYVTEIGEAKFFDANLKQEIFDGLFKHERKVTKKKLRTFLDKNFDEFRIVDIQGLDKETETFNASYATYQDLLKVIKDKVFMDNPENAEILENIVLTLTLFEDREMIKQRLAKYADVFDKKVIDQLARRHYTGWGRLSAKLLNGIRDKQSCKTIMDYLIDDAQSNRNLMQLITDDNLTFKDDIVKAQYVDNSDDLHQVVQSLAGSPAIKKGILQSLKIVDELVKVMGKEPEQIVVEMARENQTTAKGRRNSQQRYKRLKEAIKDLNHKILKEHPTDNQALQNNRLFLYYLQNGRDMYTGESLDINRLSDYDIDHVIPQAFIKDNSIDNRVLTSSKANRGKSDDVPSEDVVNRMRPFWNKLLSSGLISQRKYNNLTKKELTLDDKAGFIKRQLVETRQITKHVARMLDERFNKEFDDNNKRIRRVKIVTLKSNLVSSFRKEFELYKVREINDYHHAHDAYLNAVVVKALLVKYPKLEPEFVYGEYPKYNSYRERKATQKMFFYSNIMNMFKSKVKLADDQIVERPMIEVNDETGEIAWDKTKHITTVKKVLSYPQVNIVKKVEEQTGGLFDPKSPLEKLVPLKKALNPEKYGGYQKPTTAYPILLIVDTKQLIPISVMDKKRFEQNPVKFLKDKGYQQIEKNNFVKLPKYTLVDIGNGIKRLWASSKEVHKGNQLVVSKKSQDLLYHAHHLDNDYSNEYVKNHYQQFDILFNEITSFSKKCKLGKEHIQKIEEAYSKERDFASIEELADGFIKLLGFTQLGATSPFSFLGIKLNQKQYTGKKDYLEATLIHQSITGLYETRIDLSKLGGD

SEQ ID NO: 140 - protein, 1345 aa, Streptococcus mutans
MKKPYSIGLDIGTNSVGWSVVTDDYKVPAKKMKVLGNTDKSHIEKNLLGALLFDSGNTAEDRRLKRTARRRYTRRRNRILYLQEIFSEEMGKVDDSFFHRLEDSFLVTEDKRGERHPIFGNLEEEVKYHENFPTIYHLRQYLADNPEKVDLRLVYLALAHIIKFRGHFLIEGKFDTRNNDVQRLFQEFLAVYDNTFENSSLQEQNVQVEEILTDKISKSAKKDRVLKLFPNEKSNGRFAEFLKLIVGNQADFKKHFELEEKAPLQFSKDTYEEELEVLLAQIGDNYAELFLSAKKLYDSILLSGILTVTDVGTKAPLSASMIQRYNEHQMDLAQLKQFIRQKLSDKYNEVFSDVSKDGYAGYIDGKTNQEAFYKYLKGLLNKIEGSGYFLDKIEREDFLRKQRTFDNGSIPHQIHLQEMRAIIRRQAEFYPFLADNQDRIEKLLTFRIPYYVGPLARGKSDFAWLSRKSADKITPWNFDEIVDKESSAEAFINRMTNYDLYLPNQKVLPKHSLLYEKFTVYNELTKVKYKTEQGKTAFFDANMKQEIFDGVFKVYRKVTKDKLMDFLEKEFDEFRIVDLTGLDKENKVFNASYGTYHDLCKILDKDFLDNSKNEKILEDIVLTLTLFEDREMIRKRLENYSDLLTKEQVKKLERRHYTGWGRLSAELIHGIRNKESRKTILDYLIDDGNSNRNFMQLINDDALSFKEEIAKAQVIGETDNLNQVVSDIAGSPAIKKGILQSLKIVDELVKIMGHQPENIVVEMARENQFTNQGRRNSQQRLKGLTDSIKEFGSQILKEHPVENSQLQNDRLFLYYLQNGRDMYTGEELDIDYLSQYDIDHIIPQAFIKDNSIDNRVLTSSKENRGKSDDVPSKDVVRKMKSYWSKLLSAKLITQRKFDNLTKAERGGLTDDDKAGFIKRQLVETRQITKHVARILDERFNTETDENNKKIRQVKIVTLKSNLVSNFRKEFELYKVREINDYHHAHDAYLNAVIGKALLGVYPQLEPEFVYGDYPHFHGHKENKATAKKFFYSNIMNFFKKDDVRIDKNGEIIWKKDEHISNIKKVLSYPQVNIVKKVEEQTGGFSKESILPKGNSDKLIPRKTKKFYWDTKKYGGFDSPIVAYSILVIADIEKGKSKKLKTVKALVGVTIMEKMTFERDPVAFLERKGYRNVQEENIIKLPKYSLFKLENGRKRLLASARELQKGNEIVLPNHLGTLLYHAKNIHKVDEPKHLDYVDKHKDEFKELLDVVSNFSKKYTLAEGNLEKIKELYAQNNGEDLKELASSFINLLTFTAIGAPATFKFFDKNIDRKRYTSTTEILNATLIHQSITGLYETRIDLSKLGGD

SEQ ID NO: 141 - protein, 1345 aa, Streptococcus mutans
MKKPYSIGLDIGTNSVGWAVVTDDYKVPAKKMKVLGNTDKSHIKKNLLGALLFDSGNTAEDRRLKRTARRRYTRRRNRILYLQEIFSEEMGKVDDSFFHRLEDSFLVTEDKRGERHPIFGNLEEEVKYHENFPTIYHLRQYLADNPEKTDLRLVYLALAHIIKFRGHFLIEGKFDTRNNDVQRLFQEFLAVYDNTFENSSLQEQNVQVEEILTDKISKSAKKDRVLKLFPNEKSNGRFAEFLKLIVGNQADFKKHFELEEKAPLQFSKDIYEEELEVLLAQIGDNYAELFLSAKKLYDSILLSGILTVTDVSTKAPLSASMIQRYNEHQMDLAQLKQFIRQKLSDKYNEVFSDVSKDGYAGYIDGKTNQEAFYKYLKGLLNKIEGSGYFLDKIEREDFLRKQRTFDNGSIPHQIHLQEMRAIIRRQAEFYPFLADNQDRIEKILTFRIPYYVGPLARGKSDFAWLSRKSADKITPWNFDEIVDKESSVEAFINRMTNYDLYLPNQKVLPKHSLLYEKFTVYNELTKVKYKTEQGKTAFFDANMKQEIFDGVFKVYRKVTKDKLMDFLEKEFDEFRIVDLTGLDKENKAFNASYGTYHDLRKILDKDFLDNSKNEKILEDIVLTLTLFEDREMIRKRLKNYSDLLTKEQLKKLERRHYTGWGRLSAELIHGIRNKESRKTILDYLIDDGNSNRNFMQLINDDALSFKEEIAKAQVIGETDNLNQVVSDIAGSPAIKKGILQSLKIVDELVKIMGHQPENIVVEMARENQFTNQGRRNSQQRLKGLTDSIKEFGSQILKEHPVENSQLQNDRLFLYYLQNGRDMYTGEELDIDYLSQYDIDHIIPQAFIKDNSIDNRVLTSSKENRGKSDDVPSKNVVRKMKSYWSKLLSAKLITQRKFDNLTKAERGGLTDDDKAGFIKRQLVETRQITKHVARILDERFHTETDENNKKIRQVKIVTLKSNLVSNFRKEFELYKVREINDYHHAHDAYLNAVIGKALLGVYPQLEPEFVYGDYPHFHGHKENKATAKKFFYSNIMNFFKKDDVRTDKNGEIIWKKDEHISNIKKVLSYPQVNIVKKVEEQTGGFSKESILPKGNSDKLIPRKTKKFYWDTKKYGGFDSPIVAYSILVIADIEKGKSKKLKTVKALVGVTIMEKMTFERDPVAFLERKGYRNVQEENIIKLPKYSLFKLENGRKRLLASARELQKGNEIVLPNHLGTLLYHAKNIHKVDEPKHLDYVDKHKDEFKELLDVVSNFSKKYTLAEGNLEKIKELYAQNNGEDLKELASSFINLLTFTAIGAPATFKFFDKNIDRKRYTSTTEILNATLIHQSITGLYETRIDLSKLGGD

SEQ ID NO: 142 - protein, 1345 aa, Streptococcus mutans
MKKPYSIGLDIGTNSVGWAVVTDDYKVSAKKMKVLGNTDKSHIKKNLLGALLFDSGNTAEDRRLKRTARRRYTRRRNRILYLQEIFAEEMSKVDDSFFHRLEDSFLVTEDKRGERHPIFGNLEEEVKYHENFPTIYHLRQYLADNPEKVDLRLVYLALAHIIKFRGHFLIEGKFDTRNNDVQRLFQEFLAVYDNTFENSSLQEQNVQVEEILTDKISKSAKKDRVLKLFPNEKSNGRFAEFLKLIVGNQADFKKHFELEEKAPLQFSKDTYEEELEVLLAQIGDNYAELFLSAKKLYDSILLSGILTVTDVSTKAPLSASMIQRYNEHQMDLAQLKQFIRQKLSDKYNEVFSDVSKDGYAGYIDGKTNQEAFYKYLKGLLNKIEGSGYFLDKIEREDFLRKQRTFDNGSIPHQIHLQEMRAIIRRQAEFYPFLADNQDRIEKILTFRIPYYVGPLARGKSDFAWLSRKSADKITPWNFDEIVDKESSAEAFINRMTNYDLYLPNQKVLPKHSLLYEKFTVYNELTKVKYKTEQGKTAFFDANMKQEIFDGVFKVYRKVTKDKLMDFLEKEFDEFRIVDLTGLDKENKAFNASYGTYHDLRKILDKDFLDNSKNEKILEDIVLTLTLFEDREMIRKRLENYSDLLTKEQVKKLERRHYTGWGRLSAELIHGIRNKESRKTILDYLIDDGNSNRNFMQLINDDALSFKEEIAKAQVIGETDNLNQVVSDIAGSPAIKKGILQSLKIVDELVKIMGHQPENIVVEMARENQFTNQGRRNSQQRLKGLTDSIKEFGSQILKEHPVEHSQLQNDRLFLYYLQNGRDMYTGEELDIDYLSQYDIDHIIPQAFIKDNSIDNRVLTSSKENRGKSDDVPSKNVVRKMKSYWSKLLSAKLITQRKFDNLTKAERGGLTDDDKAGFIKRQLVETRQITKHVARILDERFHTETDENNKKIRQVKIVTLKSNLVSNFRKEFELYKVREINDYHHTHDAYLNAVIGKALLGVYPQLEPEFVYGDYPHFHGHKENKATAKKFFYSNIMNFFKKDDVRTDKNGEIIWKKDEHISNIKKVLSYPQVNIVKKVEEQTGGFSKESILPKGNSDKLIPRKTKKFYWDTKKYGGFDSPIVAYSILVIADIEKGKSKKLKTVKALVGVTIMEKMTFERDPVAFLERKGYRNVQEENIIKLPKYSLFKLENGRKRLLASARELQKGNEIVLPNHLGTLLYHAKNIHKVDEPKHLDYVDKHKDEFKELLDVVSNFSKKYTLAEGNLEKIKELYAQNNGEDLKELASSFINLLTFTAIGAPATFKFFDKNIDRKRYTSTTEILNATLIHQSITGLYETRIDLSKLGGD

SEQ ID NO: 143 - protein, 1345 aa, Streptococcus mutans
MKKPYSIGLDIGTNSVGWAVVTDDYKVPAKKMKVLGNTDKSHIKKNLLGALLFDSGNTAEDRRLKRTARRRYTRRRNRILYLQEIFSEEMGKVDDSFFHRLEDSFLVTEDKRGERHPIFGNLEEEVKYHENFPTIYHLRQYLADNPEKTDLRLVYLALAHIIKFRGHFLIEGKFDTRNNDVQRLFQEFLAVYDNTFENSSLQEQNVQVEEILTDKISKSAKKDRVLKLFPNEKSNGRFAEFLKLIVGNQADFKKHFELEEKAPLQFSKDIYEEELEVLLAQIGDNYAELFLSAKKLYDSILLSGILTVTDVSTKAPLSASMIQRYNEHQMDLAQLKQFIRQKLSDKYNEVFSDVSKDGYAGYIDGKTNQEAFYKYLKGLLNKIEGSGYFLDKIEREDFLRKQRTFDNGSIPHQIHLQEMRAIIRRQAEFYPFLADNQDRIEKILTFRIPYYVGPLARGKSDFAWLSRKSADKITPWNFDEIVDKESSVEAFINRMTNYDLYLPNQKVLPKHSLLYEKFTVYNELTKVKYKTEQGKTAFFDANMKQEIFDGVFKVYRKVTKDKLMDFLEKEFDEFRIVDLTGLDKENKAFNASYGTYHDLRKILDKDFLDNSKNEKILEDIVLTLTLFEDREMIRKRLKNYSDLLTKEQLKKLERRHYTGWGRLSAELIHGIRNKESRKTILDYLIDDGNSNRNFMQLINDDALSFKEEIAKAQVIGETDNLNQVVSDIAGSPAIKKGILQSLKIVDELVKIMGHQPENIVVEMARENQFTNQGRRNSQQRLKGLTDSIKEFGSQILKEHPVENSQLQNDRLFLYYLQNGRDMYTGEELDIDYLSQYDIDHIIPQAFIKDNSIDNRVLTSSKENRGKSDDVPSKDVVRKMKSYWSKLLSAKLITQRKFDNLTKAERGGLTDDDKAGFIKRQLVETRQITKHVARILDERFNTETDENNKKIRQVKIVTLKSNLVSNFRKEFELYKVREINDYHHAHDAYLNAVIGKALLGVYPQLEPEFVYGDYPHFHGHKENKATAKKFFYSNIMNFFKKDDVRTDKNGEIIWKKDEHISNIKKVLSYPQVNIVKKVEEQTGGFSKESILPKGNSYKLIPRKTKKFYWDTKKYGGFDSPIVAYSILVIADIEKGKSKKLKTVKALVGVTIMEKMTFERDPVAFLERKGYRNVQEENIIKLPKYSLFKLENGRKRLLASARELQKGNEIVLPNHLGTLLYHAKNIHKVDEPKHLDYVDKHKDEFKELLDVVSNFSKKYTLAEGNLEKIKELYAQNNGEDLKELASSFINLLTFTAIGAPAAFKFFDKNIDRKRYTSTTEILNATLIHQSITGLYETRIDLSKLGGD

SEQ ID NO: 144 - protein, 1345 aa, Streptococcus mutans
MKKPYSIGLDIGTNSVGWAVVTDDYKVPAKKMKVLGNTDKSHIKKNLLGALLFDSGNTAEDRRLKRTTRRRYTRRRNRILYLQEIFSEEMGKVDDSFFHRLEDSFLVTEDKRGERHPIFGNLEEEVKYHENFPTIYHLRQYLADNPEKTDLRLVYLALAHIIKFRGHFLIEGKFDTRNNDVQRLFQEFLAVYDNTFENSSLQEQNVQVEEILTDKISKSAKKDRVLKLFPNEKSNGCFAEFLKLIVGNQADFKKHFELEEKAPLQFSKDTYEEELEVLLAQIGDNYAELFLSAKKLYDSILLSGILTVTDVSTKAPLSASMIQRYNEHQMDLTQLKQFIRQKLSDKYNEVFSDVSKDGYAGYIDGKTNQEAFYKYLKGLLNKIEGSGYFLDKIEREDFLRKQRTFDNGSIPHQIHLQEMRAIIRRQAEFYPFLADNQDRIEKLLTFRIPYYVGPLASGKSDFAWLSRKSADKITPWNFDEIVDKESSAEAFINRMTNYDLYLPNQKVLPKHSLLYEKFTVYNELTKVKYKTEQGKTAFFDANMKQEIFDGVFKVYRKVTKDKLMDFLEKEFDEFRIVDLTGLDKENKVFNASYGTYHDLCKILDKDFLDNSKNEKILEDIVLTLTLFEDREMIRKRLENYSDLLTKEQVKKLERRHYTGWGRLSAELIHGIRNKESRKTILDYLIDDGNSNRNFMQLINDDALSFKEEIAKAQVIGETDNLNQVVSDIAGSPAIKKGILQSLKIVDELVKIMGHQPENIVVEMARENQFTNQGRRNSQQRLKGLTDSIKEFGSQILKEHPVENSQLQNDRLFLYYLQNGRDMYTGEELDIDYLSQYDIDHIIPQAFIKDNSIDNRVLTSSKENRGKSDDVPSKDVVRKMKSYWSKLLSAKLITQRKFDNLTKAERGGLTDDDKAGFIKRQLVETRQITKHVARILDERFNTETDENNKKIRQVKIVTLKSNLVSNFRKEFELYKVREINDYHHAHDAYLNAVIGKALLGVYPQLEPEFVYGDYPHFHGHKENKATAKKFFYSNIMNFFKKDDVRTDKNGEIIWKKDEHISNIKKVLSYPQVNIVKKVEEQTGGFSKESILPKGNSDKLIPRKTKKFYWDTKKYGGFDSPIVAYSILVIADIEKGKSKKLKTVKALVGVTIMEKMTFERDPVAFLERKGYRNVQEENIIKLPKYSLFKLENGRKRLLASARELQKGNEIVLPNHLGTLLYHAKNIHKVDEPKHLDYVDKHKDEFKELLDVVSNFSKKYTLAEGNLEKIKELYAQNNGEDLKELASSFINLLTFTAIGAPATFKFFDKNIDRKRYTSTTEILNATLIHQSITGLYETRIDLSKLGGD

SEQ ID NO: 145 - protein, 1345 aa, Streptococcus mutans
MKKPYSIGLDIGTNSVGWAVVTDDYKVPAKKMKVLGNTDKSHIKKNLLGALLFDSGNTAEDRRLKRTARRRYTRRRNRILYLQEIFSEEMGKVDDSFFHRLEDSFLVTEDKRGERHPIFGNLEEEVKYHENFPTIYHLRQYLADNPEKTDLRLVYLALAHIIKFRGHFLIEGKFDTRNNDVQRLFQEFLAVYDNTFENSSLQEQNVQVEEILTDKISKSAKKDRVLKLFPNEKSNGRFAEFLKLIVGNQADFKKHFELEEKAPLQFSKDIYEEELEVLLAQIGDNYAELFLSAKKLYDSILLSGILTVTDVSTKAPLSASMIQRYNEHQMDLAQLKQFIRQKLSDKYNEVFSDVSKDGYAGYIDGKTNQEAFYKYLKGLLNKIEGSGYFLDKIEREDFLRKQRTFDNGSIPHQIHLQEMRAIIRRQAEFYPFLADNQDRIEKILTFRIPYYVGPLARGKSDFAWLSRKSADKITPWNFDEIVDKESSAEAFINRMTNYDLYLPNQKVLPKHSLLYEKFTVYNELTKVKYKTEQGKTAFFDANMKQEIFDGVFKVYRKVTKDKLMDFLEKEFDEFRIVDLTGLDKENKAFNASYGTYHDLRKILDKDFLDNSKNEKILEDIVLTLTLFEDREMIRKRLKNYSDLLTKEQLKKLERRHYTGWGRLSAELIHGIRNKESRKTILDYLIDDGNSNRNFMQLINDDALSFKEEIAKAQVIGETDNLNQVVSDIAGSLAIKKGILQSLKIVDELVKIMGHQPENIVVEMARENQFTNQGRRNSQQRLKGLTDSIKEFGSQILKEHPVENSQLQNDRLFLYYLQNGRDMYTGEELDIDYLSQYDIDHIIPQAFIKDNSIDNRVLTSSKENRGKSDDVPSKDVVRKMKSYWSKLLSAKLITQRKFDNLTKGERGGLTDDDKAGFIKRQLVETRQITKHVARILDERFNTETDENNKKIRQVKIVTLKSNLVSNFRKEFELYKVREINDYHHAHDAYLNAVIGKALLGVYPQLEPEFVYGDYPHFHGHKENKATAKKFFYSNIMNFFKKDDVRTDKNGEIIWKKDEYISNIKKVLSYPQVNIVKKVEEQTGGFFKESILPKGDSDKLIPRKTKKFYWDTKKYGGFDSPIVAYSILVIADIEKGKSKKLKTVKALVGVTIMEKMTFERDPVAFLERKGYRNVQEENIIKLPKYSLFKLENGRKRLLASARELQKGNEIVLPNHLGTLLYHAKNIHKVDEPKHLDYVDKHKDEFKELLDVVSNFSKKYTLAEGNLEKIKELYAQNNGEDLKELASSFINLLTFTAIGAPATFKFFDKNIDRKRYTSTTEILNATLIHQSITGLYETRIDLSKLGGD

SEQ ID NO: 146 - protein, 1345 aa, Streptococcus mutans
MKKPYSIGLDIGTNSVGWAVVTDDYKVPAKKMKVLGNTDKSHIKKNLLGALLFDSGNTAEDRRLKRTARRRYTRRRNRILYLQEIFSEEMGKVNDSFFHRLEDSFLVTEDKRGERHPIFGNLEEEVKYHENFPTIYHLRQYLADNPEKVDLRLVYLALAHIIKFRGHFLIEGKFDTRNNDVQRLFQEFLAVYDNTFENSSLQEQNVQVEEILTDKISKSAKKDRVLKLFPNEKSNGRFAEFLKLIVGNQADFKKHFELEEKAPLQFSKDTYEEELEVLLAQIGDNYAELFLSAKKLYDSILLSGILTVTDVSTKAPLSASMIQRYNEHQMDLAQLKQFIRQKLSDKYNEVFSDVSKDGYAGYIDGKTNQEAFYKYLKGLLNKIEGSGYFLDKIEREDFLRKQRTFDNGSIPHQIHLQEMRAIIRRQAEFYPFLADNQDRIEKILTFRIPYYVGPLARGKSDFAWLSRKSADKITPWNFDEIVDKESSAEAFINRMTNYDLYLPNQKVLPKHSLLYEKFTVYNELTKVKYKTEQGKTAFFDANMKQEIFDGVFKVYRKVTKDKLMDFLEKEFDEFRIVDLTGLDKENKVFNASYGTYHDLCKILDKDFLDNSKNEKILEDIVLTLTLFEDREMIRKRLENYSDLLTKEQVKKLERRHYTGWGRLSAELIHGIRNKESRKTILDYLIDDGNSNRNFMQLINDDALSFKEEIAKAQVIGETDNLNQVVSDIAGSPAIKKGILQSLKIVDELVKIMGHQPENIVVEMARENQFTKQGRRNSQQRLKGLTDSIKEFGSQILKEHPVENSQLQNDRLFLYYLQNGRDMYTGEELDIDYLSQYDIDHIIPQAFIKDNSIDNRVLTSSKENRGKSDDVPSKDVVRKMKSYWSKLLSAKLITQRKFDNLTKAERGGLTDDDKAGFIKRQLVETRQITKHVARILDERFYTETDENNKKIRQVKIVTLKSNLVSNFRKEFELYKVREINDYHHAHDAYLNAVIGKALLGVYPQLEPEFVYGDYPHFHGHKENKATAKKFFYSNIMNFFKKDDVRTDKNGEIIWKKDEYISNIKKVLSYPQVNIVKKVEEQTGGFSKESILPKGNSDKLIPRKTKKFYWDTKKYGGFDSPIVAYSILVIADIEKGKSKKLKTVKALVGVTIMEKMTFERDPIAFLERKGYRNVQEENIIKLPKYSLFKLENGRKRLLASARELQKGNEIVLPNHLGTLLYHAKNIHKVDEPKHLDYVDKHKDEFKELLDVVSNFSKKYTLAEGNLEKIKELYAQNNGEDLKELASSFINLLTFTAIGAPAAFKFFDKNIDRKRYTSTTEILNATLIHQSITGLYETRIDLSKLGGD

SEQ ID NO: 147 - protein, 1345 aa, Streptococcus mutans
MKKPYSIGLDIGTNSVGWAVVTDDYKVPAKKMKVLGNTDKSHIKKNLLGALLFDSGNTAEDRRLKRTARRRYTRRRNRILYLQEIFSEEMGKVDDSFFHRLEDSFLVTEDKRGERHPIFGNLEEEVKYHENFPTIYHLRQYLADNPEKTDLRLVYLALAHIIKFGGHFLIEGKFDTRNNDVQRLFQEFLAVYDNTFENSSLQEQNVQVEEILTDKISKSAKKDRVLKLFPNEKSNGRFAEFLKLIVGNQADFKKHFELEEKAPLQFSKDIYEEELEVLLAQIGDNYAELFLSAKKLYDSILLSGILTVTDVSTKAPLSASMIQRYNEHQMDLAQLKQFIRQKLSDKYNEVFSDVSKDGYAGYIDGKTNQEAFYKYLKGLLNKIEGSGYFLDKIEREDFLRKQRTFDNGSIPHQIHLQEMRAIIRRQAEFYPFLADNQDRIEKILTFRIPYYVGPLARGKSDFAWLSRKSADKITPWNFDEIVDKESSVEAFINRMTNYDLYLPNQKVLPKHSLLYEKFTVYNELTKVKYKTEQGKTAFFDANMKQEIFDGVFKVYRKVTKDKLMDFLEKEFDEFRIVDLTGLDKENKAFNASYGTYHDLRKILDKDFLDNSKNEKILEDIVLTLTLFEDREMIRKRLKNYSDLLTKEQLKKLERRHYTGWGRLSAELIHGIRNKESRKTILDYLIDDGNSNRNFMQLINDDALSFKEEIAKAQVIGETDNLNQVVSDIAGSPAIKKGILQSLKIVDELVKIMGHQPENIVVEMARENQFTNQGRRNSQQRLKGLTDSIKEFGSQILKEHPVENSQLQNDRLFLYYLQNGRDMYTGEELDIDYLSQYDIDHIIPQAFIKDNSIDNRVLTSSKENRGKSDDVPSKNVVRKMKSYWSKLLSAKLITQRKFDNLTKAERGGLTDDDKAGFIKRQLVETRQITKHVARILDERFHTETDENNKKIRQVKIVTLKSNLVSNFRKEFELYKVREINDYHHAHDAYLNAVIGKALLGVYPQLEPEFVYGDYPHFHGHKENKATAKKFFYSNIMNFFKKDDVRTDKNGEIIWKKDEHISNIKKVLSYPQVNIVKKVEEQTGGFSKESILPKGNSDKLIPRKTKKFYWDTKKYGGFDSPIVAYSILVIADIEKGKSKKLKTVKALVGVTIMEKMTFERDPVAFLERKGYRNVQEENIIKLPKYSLFKLENGRKRLLASARELQKGNEIVLPNHLGTLLYHAKNIHKVDEPKHLDYVDKHKDEFKELLDVVSNFSKKYTLAEGNLEKIKELYAQNNGEDLKELASSFINLLTFTAIGAPATFKFFDKNIDRKRYTSTTEILNATLIHQSITGLYETRIDLSKLGGD

SEQ ID NO: 148 - protein, 1345 aa, Streptococcus mutans
MKKPYSIGLDIGTNSVGWAVVTDDYKVPAKKMKVLGNTDKSHIKKNLLGALLFDSGNTAEDRRLKRTARRRYTRRRNRILYLQEIFAEEMMQVDESFFQRLDDSFLVEEDKRGSRYPIFGTLKEEKKYHKEFKTIYHLREKLANSTEKADLRLVYLSLAHMIKFRGHFLIEGQLKAENTNVQALFKDFVEVYDKTVEESHLSEMTVDALSILTEKVSKSRRLENLVECYPTEKKNTLFGNLIALSLGLQPNFKTNFQLSEDAKLQFSKDTYEEDLEGLLGEIGDEYADLFASAKNLYDAILLSGILAVDDNTTKAPLSASMVKRYKEHKEELAAFKRFIKEKLPKKYEEIFKDDTKNGYAGYVGADATEEEFYKYVKGILNKVEGADVWLDKIDREDFLRKQRTFDNGSIPHQIHLQEMHAILRRQGEHYPFLKENQDKIEKILTFRIPYYVGPLVRKGSRFAWAEYKADEKITPWNFDDILDKEKSAEKFITRMTLNDLYLPEEKVLPKHSLLYETFTVYNELTKVKYVNEQGEAKFFDANMKQEIFDHVFKENRKVTKDKLLNYLNKEFEEFRIVNLTGLDKENKVFNSSLGTYHDLRKILNKSFLDNKENEQIIEDIIQTLTLFEDREMIRQRLQKYSDIFTKAQLKKLERRHYTGWGRLSYKLINGIRDKQSNKTILGYLIDDGYSNRNFMQLINDDALSFKEEIAKAQVIGEMDGLNQVVSDIAGSPAIKKGILQSLKIVDELVKVMGHNPANIVIEMARENQTTAKGRRSSQKRYKRLEEAIKDLNHKILKEHPTDNQALQNDRLFLYYLQNGRDMYTEDPLDINRLSDYDIDHIIPQAFIKDNSIDNRVLTRSDKNRGKSDDVPSEEVVHKMKPFWSKLLSAKLITQRKFDNLTKAERGGLTDDDKAGFIKRQLVETRQITKHVARILDERFNTETDENNKKIRQVKIVTLKSNLVSNFRKEFELYKVREINDYHHAHDAYLNAVIGKALLGVYPQLEPEFVYGDYPHFHGHKENKATAKKFFYSNIMNFFKKGDVRTDKNGEIIWKKDEHISNIKKVLSYPQVNIVKKVEEQTGGFSKESILPKGNSDKLIPRKTKKFYWDTKKYGGFDSPIVAYSILVIADIEKGKSKKLKTVKALVGVTIMEKMTFERDPVAFLERKGYRNVQEENIIKLPKYSLFKLENGRKRLLASARELQKGNEIVLPNHLETLLYHAKNIHKVDEPKHLDYVDKHKDEFKELLDVVSNFSKKYTLAEGNLEKIKELYAQNNGEDLKELASSFINLLTFTAIGAPAAFKFFDKNIDRKRYTSTTEILNATLIHQSITGLYETRIDLNKLGGD

SEQ ID NO: 149 - protein, 1345 aa, Streptococcus mutans
MKKPYSIGLDIGTNSVGWAVVTDDYKVPAKKMKVLGNTDKSHIKKNLLGALLFDSGNTAEDRRLKRTARRRYTRRRNRILYLQEIFSEEMDKVDDSFFHRLEDSFLVTEDKRGERHPIFGNLEEEVKYHENFPTIYHLRQYLADNPEKVDLRLVYLALAHIIKFRGHFLIEGKFDTRNNDVQRLFQEFLAVYDNTFENSSLQEQNVQVEEILTDKISKSAKKDRVLKLFPNEKSNGRFAEFLKLIVGNQADFKKHFELEEKAPLQFSKDTYEEELEVLLAQIGDNYAELFLSAKKLYDSILLSGILTVTDVSTKAPLSASMIQRYNEHQMDLAQLKQFIRQKLSDKYNEVFSDVSKDGYAGYIDGKTNQEAFYKYLKGLLNKIEGSGYFLDKIEREDFLRKQRTFDNGSIPHQIHLQEMRAIIRRQAEFYPFLADNQDRIEKILTFRIPYYVGPLARGKSDFAWLSRKSADKITPWNFDEIVDKESSAEAFINRMTNYDLYLPNQKVLPKHSLLYEKFTVYNELTKVKYKTEQGKTAFFDANMKQEIFDGVFKVYRKVTKDKLMDFLEKEFDEFRIVDLTGLDKENKVFNASYGTYHDLCKILDKDFLDNSKNEKILEDIVLTLTLFEDREMIRKRLENYSDLLTKEQVKKLERRHYTGWGRLSAELIHGIRNKESRKTILDYLIDDGNSNRNFMQLINDDALSFKEEIAKAQVIGETDNLNQVVSDIAGSPAIKKGILQSLKIVDELVKIMGHQPENIVVEMARENQFTKQGRRNSQQRLKGLTDSIKEFGSQILKEHPVENSQLQNDRLFLYYLQNGRDMYTGEELDIDYLSQYDIDHIIPQAFIKDNSIDNRVLTSSKENRGKSDDVPSKDVVRKMKSYWSKLLSAKLITQRKFDNLTKAERGGLTDDDKAGFIKRQLVETRQITKHVARILDERFYTETDENNKKIRQVKIVTLKSNLVSNFRKEFELYKVREINDYHHAHDAYLNAVIGKALLGVYPQLEPEFVYGDYPHFHGHKENKATAKKFFYSNIMNFFKKDDVRTDKNGEIIWKKDEHISNIKKVLSYPQVNIVKKVEEQTGGFSKESILPKGNSDKLIPRKTKKFYWDTKKYGGFDSPIVAYSILVIADIEKGKSKKLKTVKALVGVTIMEKMTFERDPVAFLERKGYRNVQEENIIKLPKYSLFKLENGRKRLLASARELQKGNEIVLPNHLGTLLYHAKNIHKVDEPKHLDYVDKHKDEFKELLDVVSNFSKKYTLAEGNLEKIKELYAQNNGEDLKELASSFINLLTFTAIGAPATFKFFDKNIDRKRYTSTTEILNATLIHQSITGLYETRIDLSKLGGD

SEQ ID NO: 150 - protein, 1345 aa, Streptococcus mutans
MKKPYSIGLDIGTNSVGWAVVTDDYKVPAKKMKVLGNTDKSHIKKNLLGALLFDSGNTAEDRRLKRTARRRYTRRRNRILYLQEIFSEEMGKVDDSFFHRLEDSFLVTEDKRGERHPIFGNLEEEVKYHENFPTIYHLRQYLADNPEKVDLRLVYLALAHIIKFRGHFLIEGKFDTRNNDVQKLFQEFLAVYDNTFENSSLQEQNVQVEEILTDKISKSAKKDRVLKLFPNEKSNGRFAEFLKLIVGNQADFKKHFELEEKAPLQLSKDTYEEELEVLLAQIGDNYAELFLSAKKLYDSILLSGILTVTDVSTKAPLSASMIQRYNEHQMDLAQLKQFIRQKLSDKYNEVFSDVSKDGYAGYIDGKTNQEAFYKYLKGLLNKIEGSGYFLDKIEREDFLRKQRTFDNGSIPHQIHLQEMRAIIRRQAEFYPFLADNQDRIEKILTFRIPYYVGPLARGKSDFAWLSRKSADKITPWNFDEIVDKESSVEAFINRMTNYDLYLPNQKVLPKHSLLYEKFTVYNELTKVKYKTEQGKTAFFDANMKQEIFDGVFKVYRKVTKDKLMDFLEKEFDEFRIVDLTGLDKENKAFNASYGTYHDLRKILDKDFLDNSKNEKILEDIVLTLTLFEDREMIRKRLENYSDLLTKEQVKKLERRHYTGWGRLSAELIHGIRNKESRKTLLDYLIDDGNSNRNFMQLINDDALSFKEEIAKAQVIGETDNLNQVVSDIAGSPAIKKGILQSLKIVDELVKIMGHQPENIVVEMARENQFTNQGRRNSQQRLKGLTDSIKEFGSQILKEHPVENSQLQNDRLFLYYLQNGRDMYTGEELDIDYLSQYDIDHIIPQAFIKDNSIDNRVLTSSKENRGKSDDVPSKDVVRKMKSYWSKLLSAKLITQRKFDNLTKAERGGLTDDDKAGFIKRQLVETRQITKHVARILDERFNTETDENNKKIRQVKIVTLKSNLVSNFRKEFELYKVREINDYHHAHDAYLNAVIGKALLGVYPQLEPEFVYGDYPHFHGHKENKATAKKFFYSNIMNFFKKDDVRTDKNGEIIWKKDEYISNIKKVLSYPQVNIVKKVEEQTGGFSKESILPKGNSDKLIPRKTKKFYWDTKKYGGFDSPIVAYSILVIADIEKGKSKKLKTVKALVGVTIMEKMTFERDPIAFLERKGYRNVQEENIIKLPKYSLFKLENGRKRLLASARELQKGNEIVLPNHLGTLLYHAKNIHKVDEPKHLDYVDKHKDEFKELLDVVSNFSKKYTLAEGNLEKIKELYAQNNGEDLKELASSFINLLTFTAIGAPATFKFFDKNIDRKRYTSTTEILNATLIHQSITGLYETRIDLSKLGGD

SEQ ID NO: 151 - protein, 1345 aa, Streptococcus mutans
MKKPYSIGLDIGTNSVGWAVVTDDYKVPAKKMKVLGNTDKSHIKKNLLGALLFDSGNTAEDRRLKRTARRRYTRRRNRILYLQEIFSEEMGKVDDSFFHRLEDSFLVTEDKRGERHPIFGNLEEEVKYHENFPTIYHLRQYLADNPEKTDLRLVYLALAHIIKFRGHFLIEGKFDTRNNDVQRLFQEFLAVYDNTFENSSLQEQNVQVEEILTDKISKSAKKDRVLKLFPNEKSNGRFAEFLKLIVGNQADFKKHFELEEKAPLQFSKDIYEEELEVLLAQIGDNYAELFLSAKKLYDSILLSGILTVTDVSTKAPLSASMIQRYNEHQMDLAQLKQFIRQKLSDKYNEVFSDVSKDGYAGYIDGKTNQEAFYKYLKGLLNKIEGSGYFLDKIEREDFLRKQRTFDNGSIPHQIHLQEMRAIIRRQAEFYPFLADNQDRIEKILTFRIPYYVGPLARGKSDFAWLSRKSADKITPWNFDEIVDKESSAEAFINRMTNYDLYLPNQKVLPKHSLLYEKFTVYNELTKVKYKTEQGKTAFFDANMKQEIFDGVFKVYRKVTKDKLMDFLEKEFDEFRIVDLTGLDKENKAFNASYGTYHDLRKILDKDFLDNSKNEKILEDIVLTLTLFEDREMIRKRLKNYSDLLTKEQLKKLERRHYTGWGRLSAELIHGIRNKESRKTILDYLIDDGNSNRNFMQLINDDALSFKEEIAKAQVIGETDNLNQVVSDIAGSLAIKKGILQSLKIVDELVKIMGHQPENIVVEMARENQFTNQGRRNSQQRLKGLTDSIKEFGSQILKEHPVENSQLQNDRLFLYYLQNGRDMYTGEELDIDYLSQYDIDHIIPQAFIKDNSIDNRVLTSSKENRGKSDDVPSKDVVRKMKSYWSKLLSAKLITQRKFDNLTKGERGGLTDDDKAGFIKHQLVETRQITKHVARILDERFNTETDENNKKIRQVKIVTLKSNLVSNFRKEFELYKVREINDYHHAHDAYLNAVIGKALLGVYPQLEPEFVYGDYPHFHGHKENKATAKKFFYSNIMNFFKKDDVRTDKNGEIIWKKDEYISNIKKVLSYPQVNIVKKVEEQTGGFFKESILPKGDSDKLIPRKTKKFYWDTKKYGGFDSPIVAYSILVIADIEKGKSKKLKTVKALVGVTIMEKMTFERDPVAFLERKGYRNVQEENIIKLPKYSLFKLENGRKRLLASARELQKGNEIVLPNHLGTLLYHAKNIHKVDEPKHLDYVDKHKDEFKELLDVVSNFSKKYTLAEGNLEKIKELYAQNNGEDLKELASSFINLLTFTAIGAPATFKFFDKNIDRKRYTSTTEILNATLIHQSITGLYETRIDLSKLGGD

SEQ ID NO: 152 - protein, 1345 aa, Streptococcus mutans
MKKPYSIGLDIGTNSVGWAVVTDDYKVPAKKMKVLGNTDKSHIKKNLLGALLFDSGNTAEDRRLKRTARRRYTRRRNRILYLQEIFSEEMGKVDDSFFHRLEDSFLVTEDKRGERHPIFGNLEEEVKYHENFPTIYHLRQYLADNPEKTDLRLVYLALAHIIKFRGHFLIEGKFDTRNNDVQRLFQEFLAVYDNTFENSSLQEQNVQVEEILTDKISKSAKKDRVLKLFPNEKSNGRFAEFLKLIVGNQADFKKHFELEEKAPLQFSKDIYEEELEVLLAQIGDNYAELFLSAKKLYDSILLSGILTVTDVSTKAPLSASMIQRYNEHQMDLAQLKQFIRQKLSDKYNEVFSDVSKDGYAGYIDGKTNQEAFYKYLKGLLNKIEGSGYFLDKIEREDFLRKQRTFDNGSIPHQIHLQEMRAIIRRQAEFYPFLADNQDRIEKILTFRIPYYVGPLARGKSDFAWLSRKSADKITPWNFDEIVDKESSAEAFINRMTNYDLYLPNQKVLPKHSLLYEKFTVYNELTKVKYKTEQGKTAFFDANMKQEIFDGVFKVYRKVTKDKLMDFLEKEFDEFRIVDLTGLDKENKAFNASYGTYHDLRKILDKDFLDNSKNEKILEDIVLTLTLFEDREMIRKRLENYSDLLTKEQVKKLERRHYTGWGRLSAELIHGIRNKESRKTLLDYLIDDGNSNRNFMQLINDDALSFKEEIAKAQVIGETDNLNQVVSDIAGSPAIKKGILQSLKIVDELVKIMGHQPENIVVEMARENQFTNQGQRNSQQRLKGLTDSIKEFGSQILKEHPVENSQLQNDRLFLYYLQNGRDMYTGEELDIDYLSQYDIDHIIPQAFIKDNSIDNRVLTSSKENRGKSDDVPSKDVVRKMKSYWSKLLSAKLITQRKFDNLTKAERGGLTDDDKAGFIKRQLVETRQITKHVARILDERFNTETDENNKKIRQVKIVTLKSNLVSNFRKEFELYKVREINDYHHAHDAYLNAVIGKALLGVYPQLEPEFVYGDYPHFHGHKENKATAKKFFYSNIMNFFKKDDVRTDKNGEIIWKKDEYISNIKKVLSYPQVNIVKKVEEQTGGFSKESILPKGDSDKLIPRKTKKFYWDTKKYGGFDSPIVAYSILVIADIEKGKSKKLKTVKALVGVTIMEKMTFERDPVAFLERKGYRNVQEENIIKLPKYSLFKLENGRKRLLASARELQKGNEIVLPDHLGTLLYHAKNIHKVDEPKHLDYVDKHKDEFKELLDVVSNFSKKYTLAEGNLEKIKELYAQNNGEDLKELASSFINLLTFTAIGAPATFKFFDKNIDRKRYTSTTEILNATLIHQSITGLYETRIDLSKLGGD

SEQ ID NO: 153 - protein, 1345 aa, Streptococcus mutans
MKKPYSIGLDIGTNSVGWAVVTDDYKVPAKKMKVLGNTDKSHIKKNLLGALLFDSGNTAADRRLKRTARRRYTRRRNRILYLQEIFAEEMSKVDDSFFHRLEDSFLVTEDKRGERHPIFGNLEEEVKYHENFPTIYHLRQYLADNPEKVDLRLVYLALAHIIKFRGHFLIEGKFDTRNNDVQRLFQEFLAVYDNTFENSSLQEQNVQVEEILTDKISKSAKKDRVLKLFPNEKSNGRFAEFLKLIVGNQADFKKHFELEEKAPLQFSKDTYEEELEVLLAQIGDNYAELFLSAKKLYDSILLSGILTVTDVSTKAPLSASMIQRYNEHQMDLAQLKQFIRQKLSDKYNEVFSDVSKDGYAGYIDGKTNQEAFYKYLKGLLNKIEGSGYFLDKIEREDFLRKQRTFDNGSIPHQIHLQEMRAIIRRQAEFYPFLADNQDRIEKILTFRIPYYVGPLARGKSDFAWLSRKSADKITPWNFDEIVDKESSAEAFINRMTNYDLYLPNQKVLPKHSLLYEKFTVYNELTKVKYKTEQGKTAFFDANMKQEIFDGVFKVYRKVTKDKLMDFLEKEFDEFRIVDLTGLDKENKAFNASYGTYHDLRKILDKDFLDNSKNEKILEDIVLTLTLFEDREMIRKRLENYSDLLTKEQVKKLERRHYTGWGRLSAELIHGIRNKESRKTILDYLIDDGNSNRNFMQLINDDALSFKEEIAKAQVIGETDNLNQVVSDIAGSPAIKKGILQSLKIVDELVKIMGHQPENIVVEMARENQFTNQGRRNSQQRLKGLTDSIKEFGSQILKEHPVKHSQLQNDRLFLYYLQNGRDMYTGEELDIDYLSQYDIDHIIPQAFIKDNSIDNRVLTSSKENRGKSDDVPSKNVVRKMKSYWSKLLSAKLITQRKFDNLTKAERGGLTDDDKAGFIKRQLVETRQITKHVARILDERFHTETDENNKKIRQVKIVTLKSNLVSNFRKEFELYKVREINDYHHAHDAYLNAVIGKALLGVYPQLEPEFVYGDYPHFHGHKENKATAKKFFYSNIMNFFKKDDVRTDKNGEIIWKKDEHISNIKKVLSYPQVNIVKKVEEQTGGFSKESILPKGNSDKLIPRKTKKFYWDTKKYGGFDSPIVAYSILVIADIEKGKSKKLKTVKALVGVTIMEKMTFERDPVAFLERKGYRNVQEENIIKLPKYSLFKLENGRKRLLASARELQKGNEIVLPNHLGTLLYHAKNIHKVDEPKHLDYVDKHKDEFKELLDVVSNFSKKYTLAEGNLEKIKELYAQNNGEDLKELASSFINLLTFTAIGAPATFKFFDKNIDRKRYTSTTEILNATLIHQSITGLYETRIDLSKLGGD

SEQ ID NO: 154 - protein, 1345 aa, Streptococcus mutans
MKKPYSIGLDIGTNSVGWAVVTDDYKVPDKKMKVLGNTDKSHIKKNLLGALLFDSGNTAEDRRLKRTARRRYTRRRNRILYLQEIFSEEMGKVDDSFFHRLEDSFLVTEDKRGERHPIFGNLEEEVKYHENFPTIYHLRQYLADNPEKTDLRLVYLALAHIIKFRGHFLIEGKFDTRNNDVQRLFQEFLAVYDNTFENSSLQEQNVQVEEILTDKISKSAKKDRVLKLFPNEKSNGRFAEFLKLIVGNQADFKKHFELEEKAPLQFSKDIYEEELEVLLAQIGDNYAELFLSAKKLYDSILLSGILTVTDVSTKAPLSASMIQRYNEHQMDLAQLKQFIRQKLSDKYNEVFSDVSKDGYAGYIDGKTNQEAFYKYLKGLLNKIEGSGYFLDKIEREDFLRKQRTFDNGSIPHQIHLQEMRAIIRRQAEFYPFLADNQDRIEKILTFRIPYYVGPLARGKSDFAWLSRKSADKITPWNFDEIVDKESSVEAFINRMTNYDLYLPNQKVLPKHSLLYEKFTVYNELTKVKYKTEQGKTAFFDANMKQEIFDGVFKVYRKVTKDKLMDFLEKEFDEFRIVDLTGLDKENKAFNASYGTYHDLRKILDKDFLDNSKNEKILEDIVLTLTLFEDREMIRKRLKNYSDLLTKEQLKKLERRHYTGWGRLSAELIHGIRNKESRKTILDYLIDDGNSNRNFMQLINDDALSFKEEIAKAQVIGETDNLNQVVSDIAGSPAIKKGILQSLKIVDELVKIMGHQPENIVVEMARENQFTNQGRRNSQQRLKGLTDSIKEFGSQILKEHPVENSQLQNDRLFLYYLQNGRDMYTGEELDIDYLSQYDIDHIIPQAFIKDNSIDNRVLTSSKENRGKSDDVPSKDVVRKMKSYWSKLLSAKLITQRKFDNLTKAERGGLTDDDKAGFIKRQLVETRQITKHVARILDERFYTETDENNKKIRQVKIVTLKSNLVSNFRKEFELYKVREINDYHHAHDAYLNAVIGKALLGVYPQLEPEFVYGDYPHFHGHKENKATAKKFFYSNIMNFFKKDDVRTDKNGEIIWKKDEHISNIKKVLSYPQVNIVKKVEEQTGGFSKESILPKGNSDKLIPRKTKKFYWDTKKYGGFDSPIVAYSILVIADIEKGKSKKLKTVKALVGVTIMEKMTFERDPVAFLERKGYRNVQEENIIKLPKYSLFKLENGRKRLLASARELQKGNEIVLPNHLGTLLYHAKNIHKVDEPKHLDYVDKHKDEFKELLDVVSNFSKKYTLAEGNLEKIKELYAQNNGEDLKELASSFINLLTFTAIGAPATFKFFDKNIDRKRYTSTTEILNATLIHQSITGLYETRIDLSKLGGD

SEQ ID NO: 155 - protein, 1345 aa, Streptococcus mutans
MKKPYSIGLDIGTNSVGWAVVTDDYKVPAKKMKVLGNTDKSHIKKNLLGALLFDSGNTAADRRLKRTARRRYTRRRNRILYLQEIFAEEMSKVDDSFFHRLEDSFLVTEDKRGERHPIFGNLEEEVKYHENFPTIYHLRQYLADNPEKVDLRLVYLALAHIIKFRGHFLIEGKFDTRNNDVQRLFQEFLAVYDNTFENSSLQEQNVQVEEILTDKISKSAKKDRVLKLFPNEKSNGRFAEFLKLIVGNQADFKKHFELEEKAPLQFSKDTYEEELEVLLAQIGDNYAELFLSAKKLYDSILLSGILTVTDVSTKAPLSASMIQRYNEHQMDLAQLKQFIRQKLSDKYNEVFSDVSKDGYAGYIDGKTNQEAFYKYLKGLLNKIEGSGYFLDKIEREDFLRKQRTFDNGSIPHQIHLQEMRAIIRRQAEFYPFLADNQDRIEKILTFRIPYYVGPLARGKSDFAWLSRKSADKITPWNFDEIVDKESSAEAFINRMTNYDLYLPNQKVLPKHSLLYEKFTVYNELTKVKYKTEQGKTAFFDANMKQEIFDGVFKVYRKVTKDKLMDFLEKEFDEFRIVDLTGLDKENKAFNASYGTYHDLRKILDKDFLDNSKNEKILEDIVLTLTLFEDREMIRKRLENYSDLLTKEQVKKLERRHYTGWGRLSAELIHGIRNKESRKTILDYLIDDGNSNRNFMQLINDDALSFKEEIAKAQVIGETDNLNQVVSDIAGSPAIKKGILQSLKIVDELVKIMGHQPENIVVEMARENQFTNQGRRNSQQRLKGLTDSIKEFGSQILKEHPVENSQLQNDRLFLYYLQNGRDMYTGEELDIDYLSQYDIDHIIPQAFIKDNSIDNRVLTSSKENRGKSDDVPSKNVVRKMKSYWSKLLSAKLITQRKFDNLTKAERGGLTDDDKAGFIKRQLVETRQITKHVARILDERFHTETDENNKKIRQVKIVTLKSNLVSNFRKEFELYKVREINDYHHAHDAYLNAVIGKALLGVYPQLEPEFVYGDYPHFHGHKENKATAKKFFYSNIMNFFKKDDVRTDKNGEIIWKKDEHISNIKKVLSYPQVNIVKKVEEQTGGFSKESILPKGNSDKLIPRKTKKFYWDTKKYGGFDSPIVAYSILVIADIEKGKSKKLKTVKALVGVTIMEKMTFERDPVAFLERKGYRNVQEENIIKLPKYSLFKLENGRKRLLASARELQKGNEIVLPNHLGTLLYHAKNIHKVDEPKHLDYVDKHKDEFKELLDVVSNFSKKYTLAEGNLEKIKELYAQNNGEDLKELASSFINLLTFTAIGAPATFKFFDKNIDRKRYTSTTEILNATLIHQSITGLYETRIDLSKLGGD

SEQ ID NO: 156 - protein, 1345 aa, Streptococcus mutans
MKKPYSIGLDIGTNSVGWAVVTDDYKVPAKKMKVLGNTDKSHIEKNLLGALLFDSGNTAEDRRLKRTARRRYTRRRNRILYLQEIFSEEMGKVDDSFFHRLEDSFLVTEDKRGERHPIFGNLEEEVKYHENFPTIYHLRQYLADNPEKVDLRLVYLALAHIIKFRGHFLIEGKFDTRNNDVQRLFQEFLAVYDNTFENSSLQEQNVQVEEILTDKISKSAKKDRVLKLFPNEKSNGRFAEFLKLIIGNQADFKKHFELEEKAPLQFSKDTYEEELEVLLAQIGDNYAELFLSAKKLYDSILLSGILTVTDVGTQAPLSASMIQRYNEHQMDLAQLKQFIRQKLSDKYNEVFSDVSKDGYAGYIDGKTNQEAFYKYLKGLLNKIEGSGYFLDKIEREDFLRKQRTFDNGSIPHQIHLQEMRAIIRRQAEFYPFLADNQDRIEKLLTFRIPYYVGPLARGKSDFAWLSRKSADKITPWNFDEIVDKESSAEAFINRMTNYDLYLPNQKVLPKHSLLYEKFTVYNELTKVKYKTEQGKTAFFDANMKQEIFDGVFKVYRKVTKDKLMDFLEKEFDEFRIVDLTGLDKENKVFNASYGTYHDLCKILDKDFLDNSKNEKILEDIVLTLTLFEDREMIRKRLENYSDLLTKEQVKKLERRHYTGWGRLSAELIHGIRNKESRKTILDYLIDDGNSNRNFMQLINDDALSFKEEIAKAQVIGETDNLNQVVSDIAGSPAIKKGILQSLKIVDELVKIMGHQPENIVVEMARENQFTNQGRRNSQQRLKGLTDSIKEFGSQILKEHPVENSQLQNDRLFLYYLQNGRDMYTGEELDIDYLSQYDIDHIIPQAFIKDNSIDNRVLTSSKENRGKSDDVPSKDVVRKMKSYWSKLLSAKLITQRKFDNLTKAERGGLTDDDKAGFIKRQLVETRQITKHVARILDERFHTETDENNKKIRQVKIVTLKSNLVSNFRKEFELYKVREINDYHHAHDAYLNAVIGKALLGVYPQLEPEFVYGDYPHFHGHKENKATAKKFFYSNIMNFFKKDDVRTDKNGEIIWKKDEHISNIKKVLSYPQVNIVKKVEEQTGGFSKESILPKGNSDKLIPRKTKKFYWDTKKYGGFDSPIVAYSILVIADIEKGKSKKLKTVKALVGVTIMEKMTFERDPVAFLERKGYRNVQEENIIKLPKYSLFKLENGRKRLLASARELQKGNEIVLPNHLGTLLYHAKNIHKVDEPKHLDYVDKHKDEFKELLDVVSNFSKKYTLAEGNLEKIKELYAQNNGEDLKELASSFINLLTFTAIGAPATFKFFDKNIDRKRYTSTTEILNATLIHQSITGLYETRIDLNKLGGD

SEQ ID NO: 157 - protein, 1345 aa, Streptococcus mutans
MKKPYSIGLDIGTNSVGWAVVTDDYKVPAKKMKVLGNTDKSHIKKNLLGALLFDSGNTAEDRRLKRTARRRYTRRRNRILYLQEIFSEEMGKVDDSFFHRLEDSFLVTEDKRGERHPIFGNLEEEVKYHENFPTIYHLRQYLADNPEKVDLRLVYLALAHIIKFRGHFLIEGKFDTRNNDVQKLFQEFLAVYDNTFENSSLQEQNVQVEEILTDKISKSAKKDRVLKLFPNEKSNGRFAEFLKLIVGNQADFKKHFELEEKAPLQLSKDTYEEELEVLLAQIGDNYAELFLSAKKLYDSILLSGILTVTDVSTKAPLSASMIQRYNEHQMDLAQLKQFIRQKLSDKYNEVFSDVSKDGYAGYIDGKTNQEAFYKYLKGLLNKIEGSGYFLDKIEREDFLRKQRTFDNGSIPHQIHLQEMRAIIRRQAEFYPFLADNQDRIEKILTFRIPYYVGPLARGKSDFAWLSRKSADKITPWNFDEIVDKESSVEAFINRMTNYDLYLPNQKVLPKHSLLYEKFTVYNELTKVKYKTEQGKTAFFDANMKQEIFDGVFKVYRKVTKDKLMDFLEKEFDEFRIVDLTGLDKENKAFNASYGTYHDLRKILDKDFLDNSKNEKILEDIVLTLTLFEDREMIRKRLENYSDLLTKEQVKKLERRHYTGWGRLSAELIHGIRNKESRKTLLDYLIDDGNSNRNFMQLINDDALSFKEEIAKAQVIGETDNLNQVVSDIAGSPAIKKGILQSLKIVDELVKIMGHQPENIVVEMARENQFTNQGRRNSQQRLKGLTDSIKEFGSQILKEHPVENSQLQNDRLFLYYLQNGRDMYTGEELDIDYLSQYDIDHIIPQAFIKDNSIDNRVLTSSKENRGKSDDVPSKDVVRKMKSYWSKLLSAKLITQRKFDNLTKAERGGLTDDDKAGFIKRQLVETRQITKHVARILDERFNTETDENNKKIRQVKIVTLKSNLVSNFRKEFELYKVREINDYHHAHDAYLNAVIGKALLGVYPQLEPEFVYGDYPHFHGHKENKATAKKFFYSNIMNFFKKDDVRTDKNGEIIWKKDEYISNIKKVLSYPQVNIVKKVEEQTGGFSKESILPKGNSDKLIPRKTKKFYWDTKKYGGFDSPIVAYSILVIADIEKGKSKKLKTVKALVGVTIMEKMTFERDPIAFLERKGYRNVQEENIIKLPKYSLFKLENGRKRLLASARELQKGNEIVLPNHLGTLLYHAKNIHKVDEPKHLDYVDKHKDEFKELLDVVSNFSKKYTLAEGNLEKIKELYAQNNGEDLKELASSFINLLTFTAIGAPAAFKFFDKNIDRKRYTSTTEILNATLIHQSITGLYETRIDLSKLGGD

SEQ ID NO: 158 - protein, 1345 aa, Streptococcus mutans
MKKPYSIGLDIGTNSVGWAVVTDDYKVPAKKMKVLGNTDKSHIKKNLLGALLFDSGNTAEDRRLKRTARRRYTRRRNRILYLQEIFSEEMGKVDDSFFHRLEDSFLVTEDKRGECHPIFGNLEEEVKYHENFPTIYHLRQYLADNPEKTDLRLVYLALAHIIKFRGHFLIEGKFDTRNNDVQRLFQEFLAVYDNTFENSSLQEQNVQVEEILTDKISKSAKKDRVLKLFPNEKSNGRFAEFLKLIVGNQADFKKHFELEEKAPLQFSKDTYEEELEVLLAQIGDNYAELFLSAKKLYDSILLSGILTVTDVSTKAPLSASMIQRYNEHQMDLTQLKQFIRQKLSDKYNEVFSDVSKDGYAGYIDGKTNQEAFYKYLKGLLNKIEGNGYFLDKIEREDFLRKQRTFDNGSIPHQIHLQEMRAIIRRQAEFYPFLADNQDRIEKILTFRIPYYVGPLARGKSDFAWLSRKSADKITPWNFDEIVDKESSAEAFINRMTNYDLYLPNQKVLPKHSLLYEKFTVYNELTKVKYKTEQGKTAFFDANMKQEIFDGVFKVYRKVTKDKLMDFLEKEFDEFRIVDLTGLDKENKAFNASYGTYHDLRKILDKDFLDNSKNEKILEDIVLTLTLFEDREMIRKRLENYSDLLTKEQVKKLERRHYTGWGRLSAELIHGIRNKESRKTLLDYLIDDGNSNRNFMQLINDDALSFKEEIAKAQVIGETDNLNQVVSDIAGSPAIKKGILQSLKIVDELVKIMGHQPENIVVEMARENQFTNQGRRNSQQRLKGLTDSIKEFGSQILKEHPVENSQLQNDRLFLYYLQNGRDMYTGEELDIDYLSQYDIDHIIPQAFIKDNSIDNRVLTSSKENRGKSDDVPSKDVVRKMKPYWSKLLSAKLITQRKFDNLTKAERGGLTDDDKAGFIKRQLVETRQITKHVARILDERFNTETDENNKKIRQVKIVTLKSNLVSNFRKEFELYKVREINDYHHAHDAYLNAVIGKALLGVYPQLEPEFVYGDYPHFHGHEENKATAKKFFYSNIMNFFKKDDVRTDKNGEIIWKKDEHISNIKKVLSYPQVNIVKKVEEQTGGFSKESILPKGNSDKLIPRKTKKFYWDTKKYGGFDSPIVAYSILVIADIEKGKSKKLKTVKALVGVTIMEKMTFERDPVAFLERKGYRNVQEENIIKLPKYSLFKLENGRKRLLASARELQKGNEIVLPNHLGTLLYHAKNIHKVDEPKHLDYVDKHKDEFKELLDVVSNFSKKYTLAEGNLEKIKELYAQNNGEDLKELSSSFINLLTFTAIGAPAAFKFFDKNIDRKRYTSTTEILNATLIHQSITGLYETRIDLSKLGGD

SEQ ID NO: 159 - protein, 1345 aa, Streptococcus mutans
MKKPYSIGLDIGTNSVGWAVVTDDYKVPAKKMKVLGNTDKSHIEKNLLGALLFDSGNTAEDRRLKRTARRRYTRRRNRILYLQEIFSEEMGKVDDSFFHRLEDSFLVTEDKRGERHPIFGNLEEEVKYHENFPTIYHLRQYLADNPEKVDLRLVYLALAHIIKFRGHFLIEGKFDTRNNDVQRLFQEFLAVYDNTFENSSLQEQNVQVEEILTDKISKSAKKDRVLKLFPNEKSNGRFAEFLKLIVGNQADFKKHFELEEKVPLQFSKDTYEEELEVLLAQIGDNYAELFLSAKKLYDSILLSGILTVTDVGTKAPLSASMIQRYNEHQMDLAQLKQFIRQKLSDKYNEVFSDVSKDGYAGYIDGKTNQEAFYKYLKGLLNKIEGSGYFLDKIEREDFLRKQRTFDNGSIPHQIHLQEMRAIIRRQAEFYPFLADNQDRIEKLLTFRIPYYVGPLARGKSDFAWLSRKSADKITPWNFDEIVDKESSAEAFINRMTNYDLYLPNQKVLPKHSLLYEKFTVYNELTKVKYKTEQGKTAFFDANMKQEIFDGVFKVYRKVTKDKLMDFLEKEFDEFRIVDLTGLDKENKVFNASYGTYHDLCKILDKDFLDNSKNEKILEDIVLTLTLFEDREMIRKRLENYSDLLTKEQVKKLERRHYTGWGRLSAELIHGIRNKESRKTILDYLIDDGNSNRNFMQLINDDALSFKEEIAKAQVIGETDNLNQVVSDIAGSPAIKKGILQSLKIVDELVKIMGHQPENIVVEMARENQFTNQGRRNSQQRLKGLTDSIKEFGSQILKEHPVENSQLQNDRLFLYYLQNGRDMYTGEELDIDYLSQYDIDHIIPQAFIKDNSIDNRVLTSSKENRGKSDDVPSKDVVRKMKSYWSKLLSAKLITQRKFDNLTKAERGGLTDDDKAGFIKRQLVETRQITKHVARILDERFNTETDENNKKIRQVKIVTLKSNLVSNFRKEFELYKVREINDYHHAHDAYLNAVIGKALLGVYPQLEPEFVYGDYPHFHGHKENKATAKKFFYSNIMNFFKKDDVRTDKNGEIIWKKDEHISNIKKVLSYPQVNIVKKVEEQTGGFSKESILPKGNSDKLIPRKTKKFYWDTKKYGGFDSPIVAYSILVIADIEKGKSKKLKTVKALVGVTIMEKMTFERDPVAFLERKGYRNVQEENIIKLPKYSLFKLENGRKRLLASARELQKGNEIVLPNHLGTLLYHAKNIHKVDEPKHLDYVDKHKDEFKELLDVVSNFSKKYTLAEGNLEKIKELYAQNNGEDLKELASSFINLLTFTAIGAPATFKFFDKNIDRKRYTSTTEILNATLIHQSITGLYETRIDLNKLGGD

SEQ ID NO: 160 - protein, 1345 aa, Streptococcus mutans
MKKPYSIGLDIGTNSVGWAVVTDDYKVPAKKMKVLGNTDKSHIKKNLLGALLFDSGNTAEDRRLKRTARRRYTRRRNRILYLQEIFSEEMGKVDDSFFHRLEDSFLVTEDKRGERHPIFGNLEEEVKYHENFPTIYHLRQYLADNPEKTDLRLVYLALAHIIKFRGHFLIEGKFDTRNNDVQRLFQEFLAVYDNTFENSSLQEQNVQVEEILTDKISKSAKKDRVLKLFPNEKSNGRFAEFLKLIVGNQADFKKHFELEEKAPLQFSKDIYEEELEVLLAQIGDNYAELFLSAKKLYDSILLSGILTVTDVSTKAPLSASMIQRYNEHQMDLAQLKQFIRQKLSDKYNEVFSDVSKDGYAGYIDGKTNQEAFYKYLKGLLNKIEGSGYFLDKIEREDFLRKQRTFDNGSIPHQIHLQEMRAIIRRQAEFYPFLADNQDRIEKILTFRIPYYVGPLARGKSDFAWLSRKSADKITPWNFDEIVDKESSAEAFINRMTNYDLYLPNQKVLPKHSLLYEKFTVYNELTKVKYKTEQGKTAFFDANMKQEIFDGVFKVYRKVTKDKLMDFLEKEFDEFRIVDLTGLDKENKAFNASYGTYHDLRKILDKDFLDNSKNEKILEDIVLTLTLFEDREMIRKRLKNYSDLLTKEQLKKLERRHYTGWGRLSAELIHGIRNKESRKTILDYLIDDGNSNRNFMQLINDDALSFKEEIAKAQVIGETDNLNQVVSDIAGSLAIKKGILQNLKIVDELVKIMGHQPENIVVEMARENQFTNQGRRNSQQRLKGLTDSIKEFGSQILKEHPVENSQLQNDRLFLYYLQNGRDMYTGEELDIDYLSQYDIDHIIPQAFIKDNSIDNRVLTSSKENRGKSDDVPSKDVVRKMKSYWSKLLSAKLITQRKFDNLTKGERGGLTDDDKAGFIKRQLVETRQITKHVARILDERFNTETDENNKKIRQVKIVTLKSNLVSNFRKEFELYKVREINDYHHAHDAYLNAVIGKALLGVYPQLEPEFVYGDYPHFHGHKENKATAKKFFYSNIMNFFKKDDVRTDKNGEIIWKKDEYISNIKKVLSYPQVNIVKKVEEQTGGFFKESILPKGDSDKLIPRKTKKFYWDTKKYGGFDSPIVAYSILVIADIEKGKSKKLKTVKALVGVTIMEKMTFERDPVAFLERKGYRNVQEENIIKLPKYSLFKLENGRKRLLASARELQKGNEIVLPNHLGTLLYHAKNIHKVDEPKHLDYVDKHKDEFKELLDVVSNFSKKYTLAEGNLEKIKELYAQNNGEDLKELASSFINLLTFTAIGAPATFKFFDKNIDRKRYTSTTEILNATLIHQSITGLYETRIDLSKLGGD

SEQ ID NO: 161 - protein, 1345 aa, Streptococcus mutans
MKKPYSIGLDIGTNSVGWAVVTDDYKVPAKKMKVLGNTDKSHIEKNLLGALLFDSGNTAEDRRLKRTARRRYTRRRNRILYLQEIFSEEMGKVDDSFFHRLEDSFLVTEDKRGERHPIFGNLEEEVKYHENFPTIYHLRQYLADNPEKVDLRLVYLALAHIIKFRGHFLIEGKFDTRNNDVQRLFQEFLAVYDNTFENSSLQEQNVQVEEILTDKISKSAKKDRVLKLFPNEKSNGRFAEFLKLIVGNQADFKKHFELEEKAPLQFSKDTYEEELEVLLAQIGDNYAELFLSAKKLYDSILLSGILTVTDVGTKAPLSASMIQRYNEHQMDLAQLKQFIRQKLSDKYNEVFSDVSKDGYAGYIDGKTNQEAFYKYLKGLLNKIEGSGYFLDKIEREDFLRKQRTFDNGSIPHQIHLQEMRAIIRRQAEFYPFLADNQDRIEKLLTFRIPYYVGPLARGKSDFAWLSRKSADKITPWNFDEIVDKESSAEAFINRMTNYDLYLPNQKVLPKHSLLYEKFTVYNELTKVKYKTEQGKTAFFDANMKQEIFDGVFKVYRKVTKDKLMDFLEKEFDEFRIVDLTGLDKENKVFNASYGTYHDLCKILDKDFLDNSKNEKILEDIVLTLTLFEDREMIRKRLENYSDLLTKEQVKKLERRHYTGWGRLSAELIHGIRNKESRKTILDYLIDDGNSNRNFMQLINDDALSFKEEIAKAQVIGETDNLNQVVSDIAGSPAIKKGILQSLKIVDELVKIMGHQPENIVVEMARENQFTNQGRRNSQQRLKGLTDSIKEFGSQILKEHPVENSQLQNDRLFLYYLQNGRDMYTGEELDIDYLSQYDIDHIIPQAFIKDNSIDNRVLTSSKENRGKSDDVPSKDVVRKMKSYWSKLLSAKLITQRKFDNLTKAERGGLTDDDKAGFIKRQLVETRQITKHVARILDERFNTETDENNKKIRQVKIVTLKSNLVSNFRKEFELYKVREINDYHHAHDAYLNAVIGKALLGVYPQLEPEFVYGDYPHFHGHKENKATAKKFFYSNIMNFFKKDDVRTDKNGEIIWKKDEHISNIKKVLSYPQVNIVKKVEEQTGGFSKESILPKGNSDKLIPRKTKKFYWDTKKYGGFDSPIVAYSILVIADIEKSKSKKLKTVKALVGVTIMEKMTFERDPVAFLERKGYRNVQEENIIKLPKYSLFKLENGRKRLLASARELQKGNEIVLPNHLGTLLYHAKNIHKVDEPKHLDYVDKHKDEFKELLDVVSNFSKKYTLAEGNLEKIKELYAQNNGEDLKELASSFINLLTFTAIGAPATFKFFDKNIDRKRYTSTTEILNATLIHQSITGLYETRIDLNKLGGD

SEQ ID NO: 162 - protein, 1336 aa, Streptococcus mutans
MKKPYSIGLDIGTNSVGWAVVTDDYKVPAKKMKVLGNTDKSHIKKNLLGALLFDSGNTAEDRRLKRTARRRYTRRRNRILYLQEIFAEEMSKVDDSFFHRLDESFLTDDDKNFDSHPIFGNKAEEDAYHQKFPTIYHLRKHLADSTEKADLRLVYLALAHMIKFRGHFLIEGELNAENTDVQKLFADFVGVYDRTFDDSHLSEITVDASSILTEKISKSRRLEKLINNYPKEKKNTLFGNLIALSLGLQPNFKTNFKLSEDAKLQFSKDTYEEDLEELLGKIGDDYADLFTLAKNLYDAILLSGILTADDSSTKAPLSASMIKRYAEHHEDLEKLKEFIKANKPELYHDIFKDETKNGYAGYIENGVKQDEFYKYLKNTLSKITGSDYFLDQIEREDFLRKQRTFDNGSIPHQIHLQEMHAILRRQGDYYPFLKENQDRIEKILTFRIPYYVGPLARKNSRFAWAEYHSDEAVTPWNFDQVIDKESSAQAFIEHMTNNDLYLPNEKVLPKHSPLYEKYTVYNELTKIKYVTEIGEAKFFDANLKQEIFDGLFKHERKVTKKKLRTFLDKNFDEFRIVDIQGLDKETETFNASYATYQDLLKVIKDKVFMDNPENAEILENIVLTLTLFEDREMIKQRLAKYADVFDKKVIDQLARRHYTGWGRLSAKLLNGIRDKQSCKTIMDYLIDDAQSNRNLMQLITDDNLTFKDDIVKAQYVDNSDDLHQVVQSLAGSPAIKKGILQSLKIVDELVKVMGKEPEQIVVEMARENQTTAKGRRNSQQRYKRLKEAIKDLNHKILKEHPTDNQALQNNRLFLYYLQNGRDMYTGESLDINRLSDYDIDHVIPQAFIKDNSIDNRVLTSSKANRGKSDDVPSEDVVNRMRPFWNKLLSSGLISQRKYNNLTKKELTLDDKAGFIKRQLVETRQITKHVARMLDERFNKEFDDNNKRIRRVKIVTLKSNLVSSFRKEFELYKVREINDYHHAHDAYLNAVVVKALLVKYPKLEPEFVYGEYLKYNSYRERKATQKMFFYSNIMNMFKSKVKLADDQIVERPMIEVNDETGEIAWDKTKHITTVKKVLSYPQVNIVKKVEEQTGGLFDPKSPLEKLVPLKKALNPEKYGGYQKPTTAYPILLIVDTKQLIPISVMDKKRFEQNPVKFLKDKGYQQIEKNNFVKLPKYTLVDIGNGIKRLWASSKEVHKGNQLVVSKKSQDLLYHAHHLDNDYSNEYVKNHYQQFDILFNEITSFSKKCKLGKEHIQKIEEAYSKERDFASIEELADGFIKLLGFTQLGATSPFSFLGIKLNQKQYTGKKDYLEATLIHQSITGLYETRIDLSKLGGD

SEQ ID NO: 163 - protein, 1345 aa, Streptococcus mutans
MKKPYSIGLDIGTNSVGWAVVTDDYKVPAKKMKVLGNTDKSHIKKNLLGALLFDSGNTAADRRLKRTARRRYTRRRNRILYLQEIFAEEMSKVDDSFFHRLEDSFLVTEDKRGERHPIFGNLEEEVKYHENFPTIYHLRQYLADNPEKVDLRLVYLALAHIIKFRGHFLIEGKFDTRNNDVQRLFQEFLAVYDNTFENSSLQEQNVQVEEILTDKISKSAKKDRVLKLFPNEKSNGRFAEFLKLIVGNQADFKKHFELEEKAPLQFSKDTYEEELEVLLAQIGDNYAELFLSAKKLYDSILLSGILTVTDVSTKAPLSASMIQRYNEHQMDLVQLKQFIRQKLSDKYNEVFSDVSKDGYAGYIDGKTNQEAFYKYLKGLLNKIEGSGYFLDKIEREDFLRKQRTFDNGSIPHQIHLQEMRAIIRRQAEFYPFLADNQDRIEKILTFRIPYYVGPLARGKSDFAWLSRKSADKITPWNFDEIVDKESSAEAFINRMTNYDLYLPNQKVLPKHSLLYEKFTVYNELTKVKYKTEQGKTAFFDANMKQEIFDGVFKVYRKVTKDKLMDFLEKEFDEFRIVDLTGLDKENKAFNASYGTYHDLRKILDKDFLDNSKNEKILEDIVLTLTLFEDREMIRKRLENYSDLLTKEQVKKLERRHYTGWGRLSAELIHGIRNKESRKTILDYLIDDGNSNRNFMQLINDDALSFKEEIAKAQVIGETDNLNQVVSDIAGSPAIKKGILQSLKIVDELVKIMGHQPENIVVEMARENQFTNQGRRNSQQRLKGLTDSIKEFGSQILKEHPVEHSQLQNDRLFLYYLQNGRDMYTGEELDIDYLSQYDIDHIIPQAFIKDNSIDNRVLTSSKENRGKSDDVPSKNVVRKMKSYWSKLLSAKLITQRKFDNLTKAERGGLTDDDKAGFIKRQLVETRQITKHVARILDERFHTETDENNKKIRQVKIVTLKSNLVSNFRKEFELYKVREINDYHHAHDAYLNAVIGKALLGVYPQLEPEFVYGDYPHFHGHKENKATAKKFFYSNIMNFFKKDDVRTDKNGEIIWKKDEHISNIKKVLSYPQVNIVKKVEEQTGGFSKESILPKGNSDKLIPRKTKKFYWDTKKYGGFDSPIVAYSILVIADIEKGKSKKLKTVKALVGVTIMEKMTFERDPVAFLERKGYRNVQEENIIKLPKYSLFKLENGRKRLLASARELQKGNEIVLPNHLGTLLYHAKNIHKVDEPKHLDYVDKHKDEFKELLDVVSNFSKKYTLAEGNLEKIKELYAQNNGEDLKELASSFINLLTFTAIGAPATFKFFDKNIDRKRYTSTTEILNATLIHQSITGLYETRIDLSKLGGD

SEQ ID NO: 164 - protein, 1345 aa, Streptococcus mutans
MKKPYSIGLDIGTNSVGWAVVTDDYKVPAKKMKVLGNTDKSHIKKNLLGALLFDSGNTAEDRRLKRTTRRRYTRRRNRILYLQEIFSEEMGKVDDSFFHRLEDSFLVTEDKRGERHPIFGNLEEEVKYHENFPTIYHLRQYLADNPEKTDLRLVYLALAHIIKFRGHFLIEGKFDTRNNDVQRLFQEFLAVYDNTFENSSLQEQNVQVEEILTDKISKSAKKDRVLKLFPNEKSNGRFAEFLKLIVGNQADFKKHFELEEKAPLQFSKDTYEEELEVLLAQIGDNYAELFLSAKKLYDSILLSGILTVTDVSTKAPLSASMIQRYNEHQMDLTQLKQFIRQKLSDKYNEVFSDVSKDGYAGYIDGKTNQEAFYKYLKGLLNKIEGSGYFLDKIEREDFLRKQRTFDNGSIPHQIHLQEMRAIIRRQAEFYPFLADNQDRIEKLLTFRIPYYVGPLASGKSDFAWLSRKSADKITPWNFDEIVDKESSAEAFINRMTNYDLYLPNQKVLPKHSLLYEKFTVYNELTKVKYKTEQGKTAFFDANMKQEIFDGVFKVYRKVTKDKLMDFLEKEFDEFRIVDLTGLDKENKVFNASYGTYHDLCKILDKDFLDNSKNEKILEDIVLTLTLFEDREMIRKRLENYSDLLTKEQVKKLERRHYTGWGRLSAELIHGIRNKESRKTILDYLIDDGNSNRNFMQLINDDALSFKEEIAKAQVIGETDNLNQVVSDIAGSPAIKKGILQSLKIVDELVKIMGHQPENIVVEMARENQFTNQGRRNSQQRLKGLTDSIKEFGSQILKEHPVENSQLQNDRLFLYYLQNGRDMYTGEELDIDYLSQYDIDHIIPQAFIKDNSIDNRVLTSSKENRGKSDDVPSKDVVRKMKSYWSKLLSAKLITQRKFDNLTKAERGGLTDDDKAGFIKRQLVETRQITKHVARILDERFNTETDENNKKIRQVKIVTLKSNLVSNFRKEFELYKVREINDYHHAHDAYLNAVIGKALLGVYPQLEPEFVYGDYPHFHGHKENKATAKKFFYSNIMNFFKKDDVRTDKNGEIIWKKDEHISNIKKVLSYPQVNIVKKVEEQTGGFSKESILPKGNSDKLIPRKTKKFYWDTKKYGGFDSPIVAYSILVIADIEKGKSKKLKTVKALVGVTIMEKMTFERDPVAFLERKGYRNVQEENIIKLPKYSLFKLENGRKRLLASARELQKGNEIVLPNHLGTLLYHAKNIHKVDEPKHLDYVDKHKDEFKELLDVVSNFSKKYTLAEGNLEKIKELYAQNNGEDLKELASSFINLLTFTAIGAPATFKFFDKNIDRKRYTSTTEILNATLIHQSITGLYETRIDLSKLGGD

SEQ ID NO: 165 - protein, 1336 aa, Streptococcus mutans
MKKPYSIGLDIGTNSVGWAVVTDDYKVPAKKMKVLGNTDKSHIKKNLLGALLFDSGNTAADRRLKRTARRRYTRRRNRILYLQEIFAEEMNKVDDSFFHRLDESFLTDDDKNFDSHPIFGNKAEEDAYHQKFPTIYHLRKHLADSTEKADLRLVYLALAHMIKFRGHFLIEGELNAENTDVQKLFADFVGVYDRTFDDSHLSEITVDASSILTEKISKSRRLEKLINNYPKEKKNTLFGNLIALSLGLQPNFKTNFKLSEDAKLQFSKDTYEEDLEELLGKIGDDYADLFTLAKNLYDAILLSGILTADDSSTKAPLSASMIKRYAEHHEDLEKLKEFIKANKPELYHDIFKDETKNGYAGYIENGVKQDEFYKYLKNTLSKIAGSDYFLDKIEREDFLRKQRTFDNGSIPHQIHLQEMHAILRRQGDYYPFLKENQDRIEKILTFRIPYYVGPLARKNSRFAWAEYHSDEAVTPWNFDQVIDKESSAQAFIEHMTNNDLYLPNEKVLPKHSPLYEKYTVYNELTKIKYVTEIGEAKFFDANLKQEIFDGLFKHERKVTKKKLRTFLDKNFDEFRIVDIQGLDKETETFNASYATYQDLLKVIKDKVFMDNPENAEILENIVLTLTLFEDREMIKQRLAKYADVFDKKVIDQLARRHYTGWGRLSAKLLNGIRDKQSCKTIMDYLIDDAQSNRNLMQLITDDNLTFKDDIVKAQYVDNSDDLHQVVQSLAGSPAIKKGILQSLKIVDELVKVMGKEPEQIVVEMARENQTTAKGRRNSQQRYKRLKEAIKDLNHKILKEHPTDNQALQNNRLFLYYLQNGRDMYTGESLDINRLSDYDIDHVIPQAFIKDNSIDNRVLTSSKANRGKSDDVPSEDVVNRMRPFWNKLLSSGLISQRKYNNLTKKELTLDDKAGFIKRQLVETRQITKHVARMLDERFNKEFDDNNKRIRRVKIVTLKSNLVSSFRKEFELYKVREINDYHHAHDAYLNAVVVKALLVKYPKLEPEFVYGEYPKYNSYRERKATQKMFFYSNIMNMFKSKVKLADDQIVERPMIEVNDETGEIAWDKTKHITTVKKVLSYPQVNIVKKVEEQTGGLFDPKSPLEKLVPLKKALNPEKYGGYQKPTTAYPILLIVDTKQLIPISVMDKKRFEQNPVKFLKDKGYQQIEKNNFVKLPKYTLVDIGNGIKRLWASSKEVHKGNQLVVSKKSQDLLYHAHHLDNDYSNEYVKNHYQQFDILFNEITSFSKKCKLGKEHIQKIEEAYSKERDSASIEELADGFIKLLGFTQLGATSPFSFLGIKLNQKQYTGKKDYLEATLIHQSITGLYETRIDLSKLGGD

SEQ ID NO: 166 - protein, 1345 aa, Streptococcus mutans
MKKPYSIGLDIGTNSVGWAVVTDDYKVPAKKMKVLGNTDKSHIKKNLLGALLFDSGNTAADRRLKRTARRRYTRRRNRILYLQEIFAEEMSKVDDSFFHRLEDSFLVTEDKRGERHPIFGNLEEEVKYYENFPTIYHLRQYLADNPEKVDLRLVYLALAHIIKFRGHFLIEGKFDTRNNDVQRLFQEFLAVYDNTFENSSLQEQNVQVEEILTDKISKSAKKDRVLKLFPNEKSNGRFAEFLKLIVGNQADFKKHFELEEKAPLQFSKDTYEEDLEELLGKIGDDYADLFTLAKNLYDAILLSGILTADDSSTKAPLSASMIQRYNEHQMDLAQLKQFIRQKLSDKYNEVFSDVSKDGYAGYIDGKTNQEAFYKYLKGLLNKIEGSGYFLDKIEREDFLRKQRTFDNGSIPHQIHLQEMRAIIRRQAEFYPFLADNQDRIEKILTFRIPYYVGPLARGKSDFAWLSRKSADKITPWNFDEIVDKESSAEAFINRMTNYDLYLPNQKVLPKHSLLYEKFTVYNELTKVKYKTEQGKTAFFDANMKQEIFDGVFKVYRKVTKDKLMDFLEKEFDEFRIVDLTGLDKENKVFNASYGTYHDLCKILDKDFLDNSKNEKILEDIVLTLTLFEDREMIRKRLENYSDLLTKEQVKKLERRHYTGWGRLSAELIHGIRNKESRKTILDYLIDDGNSNRNFMQLINDDALSFKEEIAKAQVIGETDNLNQVVSDIAGSPAIKKGILQSLKIVDELVKIMGHQPENIVVEMARENQFTNQGRRNSQQRLKGLTDSIKEFGSQILKEHPVENSQLQNDRLFLYYLQNGRDMYTGEELDIDYLSQYDIDHIIPQAFIKDNSIDNRVLTSSKENRGKSDDVPSKDVVRKMKPYWSKLLSAKLITQRKFDNLTKAERGGLTDDDKAGFIKRQLVETRQITKHVARILDERFNTETDENNKKIRQVKIVTLKSNLVSNFRKEFELYKVREINDYHHAHDAYLNAVIGKALLGVYPQLEPEFVYGDYPHFHGHEENKATAKKFFYSNIMNFFKKDDVRTDKNGEIIWKKDEHISNIKKVLSYPQVNIVKKVEEQTGGFSKESILPKGNSDKLIPRKTKKFYWDTKKYGGFDSPIVAYSILVIADIEKGKSKKLKTVKALVGVTIMEKMTFERDPVAFLERKGYRNVQEENIIKLPKYSLFKLENGRKRLLASARELQKGNEIVLPNHLGTLLYHAKNIHKVDEPKHLDYVDKHKDEFKELLDVVSNFSKKYTLAEGNLEKIKELYAQNNGEDLKELASSFINLLTFTAIGAPATFKFFDKNIDRKRYTSTTEILNATLIHQSITGLYETRIDLSKLGGD

SEQ ID NO: 167 - protein, 1345 aa, Streptococcus mutans
MKKPYSIGLDIGTNSVGWAVVTDDYKVPAKKMKVLGNTDKSHIKKNLLGALLFDSGNTAEDRRLKRTTRRRYTRRRNRILYLQEIFSEEMGKVDDSFFHRLEDSFLVTEDKRGERHPIFGNLEEEVKYHENFPTIYHLRQYLADNPEKTDLRLVYLALAHIIKFRGHFLIEGKFDTRNNDVQRLFQEFLAVYDNTFENSSLQEQNVQVEEILTDKISKSAKKDRVLKLFPNEKSNGRFAEFLKLIVGNQADFKKHFELEEKAPLQFSKDTYEEELEVLLAQIGDNYAELFLSAKKLYDSILLSGILTVTDVSTKAPLSASMIQRYNEHQMDLTQLKQFIRQKLSDKYNEVFSDVSKDGYAGYIDGKTNQEAFYKYLKGLLNKIEGSGYFLDKIEREDFLRKQRTFDNGSIPHQIHLQEMRAIIRRQAEFYPFLADNQDRIEKLLTFRIPYYVGPLASGKSDFAWLSRKSADKITPWNFDEIVDKESSAEAFINRMTNYDLYLPNQKVLPKHSLLYEKFTVYNELTKVKYKTEQGKTAFFDANMKQEIFDGVFKVYRKVTKDKLMDFLEKEFDEFRIVDLTGLDKENKVFNASYGTYHDLCKILDKDFLDNSKNEKILEDIVLTLTLFEDREMIRKRLENYSDLLTKEQVKKLERRHYTGWGRLSAELIHGIRNKESRKTILDYLIDDGNSNRNFMQLINDDALSFKEEIAKAQVIGETDNLNQVVSDIAGSPAIKKGILQSLKIVDELVKIMGHQPENIVVEMARENQFTNQGRRNSQQRLKGLTDSIKEFGSQILKEHPVENSQLQNDRLFLYYLQNGRDMYTGEELDIDYLSQYDIDHIIPQAFIKDNSIDNRVLTSSKENRGKSDDVPSKDVVRKMKSYWSKLLSAKLITQRKFDNLTKAERGGLTDDDKAGFIKRQLVETRQITKHVARILDERFNTETDENNKKIRQVKIVTLKSNLVSNFRKEFELYKVREINDYHHAHDAYLNAVIGKALLGVYPQLEPEFVYGDYPHFHGHKENKATAKKFFYSNIMNFFKKDDVRTDKNGEIIWKKDEHISNIKKVLSYPQVNIVKKVEEQTGGFSKESILPKGNSDKLIPRKTKKFYWDTKKYGGFDSPIVAYSILVIADIEKGKSKKLKTVKALVGVTIMEKMTFERDPVAFLERKGYRNVQEENIIKLPKYSLFKLENGRKRLLASARELQKGNEIVLPNHLGTLLYHAKNIHKVDEPKHLDYVDKHKDEFKELLDVVSNFSKKYTLAEGNLEKIKELYAQNNGEDLKELASSFINLLTFTAIGAPATFKFFDKNIDRKRYTSTTEILKATLIHQSITGLYETRIDLSKLGGD

SEQ ID NO: 168 - protein, 1338 aa, Streptococcus mutans
  source 1..1338: note = NLML4
MDLIGTNSVGWAVVTDDYKVPAKKMKVLGNTDKSHIKKNLLGALLFDSGNTAADRRLKRTARRRYTRRRNRILYLQEIFAEEMSKVDDSFFHRLEDSFLVTEDKRGERHPIFGNLEEEVKYHENFPTIYHLRQYLADNPEKVDLRLVYLALAHIIKFRGHFLIEGKFDTRNNDVQRLFQEFLAVYDNTFENSSLQEQNVQVEEILTDKISKSAKKDRVLKLFPNEKSNGRFAEFLKLIVGNQADFKKHFELEEKAPLQFSKDTYEEELEVLLAQIGDNYAELFLSAKKLYDSILLSGILTVTDVSTKAPLSASMIQRYNEHQMDLAQLKQFIRQKLSDKYNEVFSDVSKDGYAGYIDGKTNQEAFYKYLKGLLNKIEGSGYFLDKIEREDFLRKQRTFDNGSIPHQIHLQEMRAIIRRQAEFYPFLADNQDRIEKILTFRIPYYVGPLARGKSDFAWLSRKSADKITPWNFDEIVDKESSAEAFINRMTNYDLYLPNQKVLPKHSLLYEKFTVYNELTKVKYKTEQGKTAFFDANMKQEIFDGVFKVYRKVTKDKLMDFLEKEFDEFRIVDLTGLDKENKAFNASYGTYHDLRKILDKDFLDNSKNEKILEDIVLTLTLFEDREMIRKRLENYSDLLTKEQVKKLERRHYTGWGRLSAELIHGIRNKESRKTILDYLIDDGNSNRNFMQLINDDALSFKEEIAKAQVIGETDNLNQVVSDIAGSPAIKKGILQSLKIVDELVKIMGHQPENIVVEMARENQFTNQGRRNSQQRLKGLTDSIKEFGSQILKEHPVEHSQLQNDRLFLYYLQNGRDMYTGEELDIDYLSQYDIDHIIPQAFIKDNSIDNRVLTSSKENRGKSDDVPSKNVVRKMKSYWSKLLSAKLITQRKFDNLTKAERGGLTDDDKAGFIKRQLVETRQITKHVARILDERFHTETDENNKKIRQVKIVTLKSNLVSNFRKEFELYKVREINDYHHAHDAYLNAVIGKALLGVYPQLEPEFVYGDYPHFHGHKENKATAKKFFYSNIMNFFKKDDVRTDKNGEIIWKKDEHISNIKKVLSYPQVNIVKKVEEQTGGFSKESILPKGNSDKLIPRKTKKFYWDTKKYGGFDSPIVAYSILVIADIEKGKSKKLKTVKALVGVTIMEKMTFERDPVAFLERKGYRNVQEENIIKLPKYSLFKLENGRKRLLASARELQKGNEIVLPNHLGTLLYHAKNIHKVDEPKHLDYVDKHKDEFKELLDVVSNFSKKYTLAEGNLEKIKELYAQNNGEDLKELASSFINLLTFTAIGAPATFKFFDKNIDRKRYTSTTEILNATLIHQSITGLYETRIDLSKLGGD

SEQ ID NO: 169 - protein, 1362 aa, Streptococcus oralis
ENKNYSIGLDIGTNSVGWAVITDDYKVPSKKMKVLGNTDKRFIKKNLIGALLFDEGTTAEARRLKRTARRRYTRRKNRLRYLQEIFAEEMSKVDSSFFHRLDDSFLIPEDKKGSKYPIFATLIEEKEYHKQFPTIYHLRKQLADSKEKTDLRLIYLALAHMIKYRGHFLYEDTFDIKNNDIQKIFNEFISIYNNTFEGNSLSGQNVQVEAIFTDKISKSAKRERVLKLFPDEKSTGLFSEFLKLIVGNQADFKKHFDLEEKAPLQFSRDTYDEDLENLLGQIGDDFADLFVAAKKLYDAILLSGILTVTDPSTKAPLSASMIERYENHQKDLATLKQFIKTNLPEKYDEVFSDQSKDGYAGYIDGKTTQESFYKYIKNLLSKFEGADYFLEKIEREDFLRKQRTFDNGSIPHQIHLQEMNAILRRQGEHYPFLKENKEKIEKILTFRIPYYVGPLARGNRDFAWLTRNSDQAIRPWNFEEIVDKASSAESFINKMTNYDLYLPEEKVLPKHSLLYETFAVYNELTKVKFIAEGLRDYQFLDSRQKKDIFYTLFKAEDKRKVTEKDIIQYLHTVDGYDGIELKGIEKQFNASLSTYHDLLKIIKDKEFMDDPNNEEILENIVHTLTIFEDREMIKQRLAQYDSLFDEKVIKALTRRHYTGWGKLSSKLINGIRDKQTGKTILDYLMDDGYNNRNFMQLINDDELSFKEIIKKAQVVGKTDDVKQVVQELPGSPAIKKGILQSIKLVDELVKVMGHEPESIVIEMARENQTTARGKKNSQQRYKRIEDSLKILASKILKEHPTDNIQLQNDRLFLYYLQNGRDMYTGKPLDINQLSSYDIDHIVPQAFIKDDSLDNRVLTSLKDNRGKSDNVPSLEVVEKMKTFWQQLLDSKLISYRKFNNLTKAERGGLDERDKVGFIKRQLVETRQITKHVAQILDARYNTEVNEKDKKNRTVKIITLKSNLVSNFRKEFRLYKIREINDYHHAHDAYLNAVVAKAILKKYPKLEPEFVYGDYQKYDLSKDPKEIEKATEKYFFYSNLLNFFKEEVHYADGTIVKRENIEYSKDTGEIAWNKEKDFATIKKVLSLPQVNIVKKREVQTGGFSKESILPKGNSDKLIPRKTKDILWDTTKYGGFDSPVIAYSILLIADIEKGKAKRLKTVKTLVGITIMEKATFEKSPIAFLENKGYHNVRKENILCLPKYSLFELKNGRRRMLASAKELQKGNEIVLPVHLTTLLYHAKNIHRLDEPEHLEYIQKHRNEFKGLLNLVSEFSQKYVLADANLEKIKNLYADNEQADIEILANSFINLLTFTALGAPAAFKFFGKDVDRKRYTTVSEILNATLIHQSITGLYETRIDLSKLGED

SEQ ID NO: 170 - protein, 1360 aa, Streptococcus oralis
ENKNYSIGLDIGTNSVGWSVITDDYKVPSKKMKVLGNTDKRFIKKNLIGALLFDEGTTAEARRLKRTARRRYTRRKNRLRYLQEIFAEEMSKVDSSFFHRLDDSFLIPEDKRGSKYPIFATLAEEKEYHKQFPTIYHLRKQLADSKEKTDLRLIYLALAHMIKYRGHFLYEDTFDIKNNDIQKIFSEFISIYDNTFEGSSLSGQNAQVEAIFTDKISKSAKRERVLKLFPDEKSTGLFSEFLKLIVGNQADFKKHFDLGEKAPLQFSKDTYDEDLENLLGQIGDDFADLFLVAKKLYDAILLSGILTVTDPSTKAPLSASMIERYENHQKDLAVLKQFIKNNLPEKYDEVFSDQSKDGYAGYIDGKTTQEAFYKYIKNLLSKFEGTDYFLEKIEREDFLRKQRTFDNGSIPHQIHLQEMNAILRRQGEHYPFLKDNKEKIEKILTFRIPYYVGPLARGNRDFAWLTRNSDEAIRPWNFEEIVDKASSAEDFINKMTNYDLYLPEEKVLPKHSLLYETFAVYNELTKVKFIAEGLRDYQFLDSGQKKQIVTQLFKEKRKVTEKDIIQFLHNVDGYDGIELKGIEKQFNASLSTYHDLLKIIKDKEFMDDSKNEEILENIVHTLTIFEDREMIKQRLAQYDSLFDEKVIKALIRRHYTGWGKLSAKLIDGICDKQTGNTILDYLIDDGKNNRNFMQLINDDGLSFKEITQKAQVVGKTDDVKQVVQELPGSPAIKKGILQSIKIVDELVKVMGHTPESIVIEMARENQTTARGKKNSQQRYKRIEDALKNLASNILKEHPTNNIQLQNDRLFLYYLQNGRDMYTGKPLDINQLSSYDIDHIVPQAFIKDDSLDNRVLTSLKDNRGKSDNVPSIEVVQKRKAFWQQLLDSKLISERKFNNLTKAERGGLDERDKVGFIKRQLVETRQITKHVAQILDARFNKEVNEKDKKNRTVKIITLKSNLVSNFRKEFRLYKVREINDYHHAHDAYLNAVVAKAILKKYPKLEPEFVYGDYQKYDLSRNPKEVEKATEKYFFYSNLLNFFKEEVHYADGTIVKRENIEYSKDTGEIAWNKEKDFATIKKVLSYPQVNIVKKREVQTGGFSKESILPKGNSDKLIPRKTKDILWETTKYGGFDSPVIAYSILLIADIEKGKAKKLKTVKTLVGITIMEKAAFEENPITFLENKGYHNVRKENILCLPKYSLFELENGRRRLLASAKELQKGNEIVLPVYLTTLLYHSKNVHKLDEPEHLEYIQKHRNEFKDLLNLVSEFSQKYVLADANLEKIQNLYADNEQADIEILANSFINLLTFTALGAPAAFKFFGKDIDRKRYTTVSEILNATLIHQSITGLYETRIDLSKLGED

SEQ ID NO: 171 - protein, 1358 aa, Streptococcus parasanguinis
KKPYSIGLDIGTNSVGWAVITDDYKVPAKKMKVLGNTNKESIKKNLIGALLFDAGNTAADRRLKRTARRRYTRRRNRILYLQEIFAAEMNKVDESFFHRLDDSFLVPEDKRGSKYPIFGTLEEEKEYHKQFPTIYYLRKILADSKEKVDLRLIYLALAHIIKYRGHFLYEDSFDIKNNDIQKIFNEFTILYDNTFEESSLSKGNAQVEEIFTDKISKSAKRDRVLKLFPDEKSTGLFSEFLKLIVGNQADFKKHFDLEEKAPLQFSKDTYEEDLESLLGQIGDVYADLFVVAKKLYDAILLAGILSVKDPGTKAPLSASMIERYDNHQNDLSALKQFVRRNLPEKYAEVFSDDSKDGYAGYIDGKTTQEGFYKYIKNLISKIEGAEYFLEKIEREDFLRKQRTFDNGSIPHQIHLQEMNAILRHQGEYYPFLKENKDKIEQILTFRIPYYVGPLARGNSDFAWLSRNSDEAIRPWNFEEMVDKSSSAEDFIHRMTNYDLYLPEEKVLPKHSLLYETFTVYNELTKVKYIAEGMKDYQFLDSGQKKQIVNQLFKEKRKVTEKDIIHYLHNVDGYDGIELKGIEKHFNSSLSTYHDLLKIIKDKEFMDDPKNEEIFENIVHTLTIFEDRVMIKQRLNQYDSIFDEKVIKALTRRHYTGWGKLSAKLINGIRDKKTSKTILDYLIDDGYSNRNFMQLINDDGLSFKETIQKAQVVGETNDVKQVVQELPGSPAIKKGILQSIKIVDELVKVMGHAPESVVIEMARENQTTNKGKSKSQQRLKTLSDAISELGNILKEHPTDNIQLQNDRLFLYYLQNGKDMYTGEALDINQLSNYDIDHIIPQAFIKDDSLDNRVLTSSKDNRGKSDNVPSLEIVEKMKGFWQQLLDSKLISERKFNNLTKAERGGLDERDKVGFIKRQLVETRQITKHVAQILDDRFNAEVNEKNQKLRSVKIITLKSNLVSNFRKEFGLYKVREINDYHHAHDAYLNAVVAKAILKKYPKLEPEFVYGDYQKYDLTKDPKEIEKATEKYFFYSNLLNFFKDKVYYADGTIIQRGNVEYSKDTGEIAWNKKRDFAIVRKVLSYPQVNIVKKTEEQTGGFSKESILPKGNSDKLIPRKTKNVQLDTTKYGGFDSPVIAYSILLVADVEKGKSKKLKTVKSLIGITIMEKVKFEANPVAFLEGKGYQNVVEENIIRLPKYSLFELENGRRRMLASAKELQKGNEMVLPSYLIALLYHAKRIQKKDEPEHLEYIKQHHSEFNDLLNFVSEFSQKYVLAESNLEKIKNLYIDNEQTNMEEIANSFINLLTFTAFGAPAVFKFFGKDIERKRYSTVTEILKATLIHQSLTGLYETRIDLSKLGEE

SEQ ID NO: 172 - protein, 1327 aa, Streptococcus parauberis
MKVLGNTDRQTVKKNMIGTLLFDSGETAEARRLKRTARRRYTRRINRIKYLQSIFDDEMSKIDSAFFQRIKDSFLVPDDKNDDRHPIFGNIKDEVDYHKNYPTIYHLRKKLADSDEKADLRLIYLALAHIIKFRGHFLIEGDLDSQNTDVNALFLKLVDTYNLMFEDDIDTQTIDATVILTEKMSKSRRLENLIAKIPNQKKNTLFGNLISLSLGLTPNFKANFELSEDAKLQISKESFEEDLDNLLAQIGDQYADLFIAAKNLSDAILLSDILTVKGVNTKAPLSASMVQRFNEHQDDLKLLKKLVKVQLPEKYKEIFDIKDKNGYAGYINGKTSQEDFYKYIKPILSKLKGAESLISKLEREDFLRKQRTFDNGSIPHQIHLNELKSIIRRQEKYYPFLKDKQVRIEKIFTFRIPYFVGPLANGNSSFAWVKRRSNESITPWNFEEVVEQEASAKVFIERMTNFDTYLPEEKVLPKHSLLYEMFTVYNELTKVKYQAEGMRKPEFLSSEEKIEIVSNLFKTERKVTVKQLKENYFNKIRCLDSITISGVEDKFNASLGTYHDLLNIIKNQKILDDEQNQDSLEDIVLTLTLFEDEKMIAKRLSKYESIFDPSILKKLKKRHYTGWGRLSQKLINGIRDKQTGKTILDFLIDGQANRNFMQLINDPSLDFASIIKEAQEKTIKSEKLEETIANLAGSPAIKKGILQSVKIVDEVVKVMGYEPSNIVIEMARENQSTQRGINNSRERLRKLEEVHKNIGSKILKEHEISNAQLQSDRVYLYLLQDGKDMYTGKDLDFDRLSQYDIDHIIPQSFIKDNSIDNIVLTSQESNRGKSDNVPYIAIVNKMKSYWQHQLKSGAISQRKFDNLTKAERGGLSEYDKAGFIKRQLVETRQITKHVAQILNNRFNNNVDDSSKNKRPVKIITLKSKMVSDFRKEFGFYKIREVNDYHHAHDAYLNAVVGTALLKKYPKLEAEFVYGDYKHYDLSDTSLGKATAKMFFYSNIMNFFKKEVRLADGTVITRPQIETNTETGEIVWDKVKDIKTIRKVLSIPQINVVKKTEVQTGGFSKESILSKRDSDKLIPRKNNWDPKKYGGFGSPIIAYSVLVVAKVTKGKSQKTKSVKELVGITIMEQNEFEKDRITFLEKKGYQDIQESLIIKLPKFSLFELENGRKRLLASELQKGNELSLPNKYIQFLYLASRYTSFSGKEEDREKHRHFVESHLHYFDEIKDIIADFSRRYILADANLEKILTLYNEKNQFSIEEQATNMLNLFTFTGLGAPATLKFFNVDIDRKRYTSSTEILNSTLIRQSITGLYETRIDLSKIGGD

SEQ ID NO: 173 - protein, 1355 aa, Streptococcus phocae
KKSYSIGLDIGTNSVGWAVITDDYKVPAKKMKVLGNTSRQSIKKNMIGALLFDEGGPAASTRVKRTTRRRYTRRKNRLCYLRDIFESEMHTIDKHFFLRLEDSFLHKSDKRYEAHPIFGTLQEEKAYHDNYPTIYHLRKALADNTEKADLRLIYLALAHIIKFRGHFLIEGALSANNTDVQQLVHALVDAYNIMFEEDLDIEAIDVKAILTEKISKTRRLENLISNIPGQKKNGLFGNLIALSLGLTPNFKSHFNLPEDAKLQLAKDTYDEELNNLLTQIGDEYADLFLSAKNLSDAILLSDILTVNGDGTQAPLSASLIKRYEEHRQDLALLKQMFKEQLPDLYRDVFTDENKDGYAGYISGKTSQEAFYKYIKPILETLDGAEDFLTKINREDFLRKQRTFDNGSIPHQIHLGELQAILERQQAYYPFLKDNQEKIEKILTFRIPYYIGPLARGNSRFAWLTRTSDQKITPWNFDEMVDQEASAQAFIERMTNFDEYLPQEKVLPKHSLTYEYFTVYNELTKVKYVTEGMTKPEFLSAGQKEQIVELLFKKYRKVTVKQLKEDFFSKIECFDTVDISGVEDKFNASLGTYHDLLKIIKDKAFLDNSENENIIEDIILTLTLFEDKEMIANRLAVYEDLFDQNVLKQLKRRHYTGWGRLSKQLINGMRDKHTGKTILDFLKDGFINRNFMQLINDDNLSFKEEIKKAQEGGLKDSINDQIRDLAGSPAIKKGILQTINIVDEIVKIMGKAPQHIVVEMARDVQKTDIGVKQSRERMKRVQEVLKKLGSQLLKEHPVENFQLQNERLYLYYLQNGKDMYTGEELSISNLSHYDIDHIIPRSFIKDDSIDNKVLTRSEHNRGKTDNVPSIEVVKRMKPYWQKLLDTKVISQRKFDNLTKAERGGLQESDKANFIQRQLVETRQITKHVAQILDSRFNTERDEKDRPIRRVKVITLKSKFVSDFRQDFGFYKLREINDYHHAHDAYLNAVVGTALLKMYPKLASEFVYGDYQKYDLSGKASGHATAKYFFYSNLMNFFKSEVKLANGNIIKRSPIEVNEETGEIVWDKTKDFGTVRKVLSAPQVNIVKKTEIQTGGFSNETILSKGKSSKLIPRKNKWRDTTKYGGFNTPTVAYSVLVVAKVEKGKAKKLKPVKELVGITIMERTKFEANPIAFLESKGYHDIQEHLMITLPKYSLFELENGRRRLLASELQKGNEMVLPQHLVTFLYRVSKRDKGTQSENMEYISNHKEKFIEIFHYIIRYAEKNVIKPKVIERLNDTFNQKFNDSDLTELSISFLNLFKFTSFGAPEKFTFLNSEIKQDDVRYRSTKECLNSTLIHQSVTGLYETRIDLSQFGGD

SEQ ID NO: 174 - protein, 1361 aa, Streptococcus pseudopneumoniae
SNKPYSIGLDIGTNSVGWAVITDDYKVPSKKMKVLGNTDKHFIKKNLIGALLFDEGTTAEDRRLKRTARRRYTRRKNRLRYLQEIFSEEISKVDNSFFHRLDDSFLVPEDKRGSKYPIFATLTEEKEYYKQFPTIYHLRKQLADSKEKADLRLIYLTLAHMIKYRGHFLYEESFDIKNNDIQKIFNEFISIYDNTFEGSSLSGQNAQVEAIFTDKISKSTKRERVLKLFPDQKSTGLFSEFLKLIVGNQADFKKHFDLEEKAPLQFSKDTYDEDLENLLGQIGDDFADLFLVAKKLYDAILLSGILTVTDPSTKAPLSASMIERYENHQKDLAALKQFIKNNLPEKYDEVFSDQSKEGYAGYIDSKTTQEAFYKYIKNLLSKIDGADYLLDKIEREDFLRKQRTFDNGSIPHQIHLQEMNAILRRQGEHYPFLKENREKIEKILTFRIPYYVGPLARGNRDFAWLTRNSDQAIRPWNFEEIVDKASSAEAFINKMTNYDLYLPEEKVLPKHSLLYETFAVYNELTKVKFIAEGLRDYQFLDSGQKKKIINQLFKEKRKVTEKDLIHYLHNVDGYDGIELKGIEKQFNASLSTYHDLLKIIKDKRFMDEPKNQEILENIVHTLTIFEDREMIKQRLAQYASIFDEKVIKTLTRRHYTGWGKLSAKLINCIRDRKTGKTILDYLIDDGYNNRNFMQLINDDGLSFKEIIQESQVVGKPDDVKQIVQELPGSSAIKKGILQSIKLVDELVKVMGHDPESIVIEMARENQTTARGKKNSQQRYKRIEDSLKILASNILKEHPTDNIQLQNDRLFLYYLQNGKDMYTGNPLDINHLSSYDIDHIIPQAFIKDDSLDNRVLTSSKDNRGKSDNVPSLEVVQKRKAFWQQLLESKLISERKFNNLTKAERGGLNERDKVGFIKRQLVETRQITKHVAQILDSRFNTKVNEKNQKIRTVKIITLKSNLVSNFRKEFRLYKVREINDYHHAHDAYLNAVVAKAILKKYPKLEPEFVYGDYQKYDLSRDPKEIEKATEKYFFYSNLLNFFKEEVHYADGTIVKRENIEYSKDTGEIAWNKEIDFATIRKILSLSQVNIVKKTEEQTGGLFDNNIVSKKKVVDASKLIPIKSGLSPEKYGGYARPTIAYSVLVIADIEKGKAKKLKRIKEMVGITIQDKKKFEANPTAYLEEYGYKNINPNLIIKLPKYSLFKFNDGQRRLLASSIELQKGNELILPYHFTTLLYHAQRINKISEPIHKQYVETHQSEFEELLTTIISLSKKYIQKPIVESLLQQAFEQADKDIYQLSESFISLLKLTSFGAPGAFRFLGVEISQSNVRYQSVSSCFNATLIHQSITGLYETRIDLSKLGED

SEQ ID NO: 175 - protein, 1361 aa, Streptococcus pseudopneumoniae
SNKPYSIGLDIGTNSVGWVIITDDYKVPSKKMKVLGNTDKHFIKKNLIGALLFDEGTTAEDRRLKRTARRRYTRRKNRLRYLQEIFAEEMNKVDSSFFHRLDDSFLVPEDKRGSKYPIFATLAEEKEYHKNFPTIYHLRKQLADSKEKADLRLIYLALAHMIKYRGHFLYEEAFDIKNNDIQKIFNEFINIYDNTFEGSSLSGQNEQVEAIFSDKISKSAKRERVLKLFPDEKSTGLFSEFLKLIVGNQADFKKHFDLEEKAPLQFSKDTYDEDLENLLGQIGDGFADLFLVAKKLYDAILLSGILTVTDPSTKAPLSASMIERYQNHQNDLASLKQFIKNNLPEKYDEVFSDQSKDGYAGYVDGKTTQEAFYKYIKNLLSKFEGADYFLEKIEREDFLRKQRTFDNGSIPHQIHLQEMNAILRRQGEHYPFLKENKEKIEKILTFRIPYYVGPLARGNRDFAWLTRNSDQAIRPWNFEEIVDKASSAEDFINKMTNYDLYLPEEKVLPKHSLLYETFAVYNELTKVKFIAEGLRDYQFLDSGQKKQIVNQLFKEKRKVTEKDIIQYLHNVDGYDGIELKGIEKQFNASLSTYHDLLKIIKDKEFMDDSKNEEILENIVHTLTIFEDREMIKQRLAQYDSIFDEKVIKALTRRHYTGWGKLSAKLINGIRDKQTGKTILDYLIDDGYSNRNFMQLINDDGLSFKEIIQKAQVFGKTNDVKQVVQELPGSPAIKKGILQSIKIVEELVKVMGHEPESIVIEMARENQTTTRGKKNSQQRYKRIENSLKILASKILKEHPTDNNQLQNDRLFLYYLQNGKDMYTGEALDINQLSSCDIDHIIPQAFIKDDSLDNRVLTSSKENRGKSDNVPCLEVVDKMKVFWQQLLDFKLISYRKFNNLTKAERGGLDERDKVGFIRRQLVETRQITKHVAQILDSRFNTEVTEKDKKNRNVKIITLKSNLVSNFRKEFGLYKVREINDYHHAHDAYLNAVVAKAILKKYPKLEPEFVYGDYQKYDLSKDPKDIEKATEKYFFYSNLLNFFKEEVHYADGTIVKRENIEYSKDTGEIAWNKEKDFATIKKILSLPQVNIVKKTEEQTGGLFDNNIVSKKKVVDASKLIPIKSGLSPEKYGGYARPTIAYSVLVIADIEKGKTKKLKRIKEMIGITVQDKKIFESNPIAYLEECGYKNINPNLIIKLPKYSLFEFNGGQRRLLASSIELQKGNELILPYHFTALLYHTQRINKISEPIHKQYVEAHQNEFKELLTTIISLSKKYIQKPNVESLLQQAFEQADKDIYQLSESFISLLKLTSFGAPGAFKFLGVEISQSSVRYKPNSQFLDATLIHQSITGLYETRIDLSKLGED

SEQ ID NO: 176 - protein, 1363 aa, Streptococcus pseudopneumoniae
SNKPYSIGLDIGTNSVGWAVITDDYKVPSKKMTVLGNTDKHFIKKNLIGALLFDEGTTAEDRRLKRTARRRYTRRKNRLRYLQEIFSGEMSKVDSSFFHRLDDSFLVPEDKRGSKYPIFATLVEEKEYHKQFPTIYHLRKQLADSKEKADLRLIYLVLAHMIKYRGHFLYEEAFDIKNNDIQKIFNEFISIYDNTFEGSSLSGQNAQVETIFTDKISKSAKRERVLKLFPDEKSTGLFSEFLKLIVGNQADFKKHFDLGEKAPLQFSKDTYDEDLENLLGQIGDDFADLFLVAKKLYDAILLSGILTVTDPSTKAPLSASMIERYENHQKDLTTLKQFIKNNLPEKYDEVFSDQSKDGYAGYIDGKTTQEAFYKYIKNLLSKFEGTDYFLEKIEREDFLRKQRTFDNGSIPHQIHLQEMNAILRRQGEHYPFLKENKEKIEKILTFRIPYYVGPLARGNRDFAWLTRNSDQAIRPWNFEEIVDKASSAEDFINKMTNYDLYLPEEKVLPKHSLLYETFAVYNELTKVKFIAEGLRDYQFLDSGQKKQIVNQLFKEKRKVTEKDIIHYLHTVDGYDGIELKGIEKQFNASLSTYHDLLKIIKDKEFMDDSKNEAILENIVHTLTIFEDREMIKQRLAQYDSLFDKKVIKALTRRHYTGWGKLSAKLINGICDKQTGNTILDYLIDDGEINRNFMQLINDDGLSFKKIIQKSQVVGETDDVKQVVRELPGSPAIKKGILQSIKIVDELVKVMDHAPESIVIEMARENQTTARGKKNSQQRYKRIEDSLKILASNILKENPTDNNQLQNDRLFLYYLQNGKDMYTGEALDINQLSSYDIDHIIPQAFIKDDSLDNRVLTSSKDNRGKSDNVPSLEVVQKRKAFWQQLLDSKLISERKFNNLTKAERERDGLNELDKVGFIKRQLVETRQITKHVAQILDARFNKEVTEKDKKNRNVKIITLKSNLVSNFRKEFRLYKVREINDYHHAHDAYLNAVVAKAILKKYPKLEPEFVYGDYQKNDLSKDPKDIEKATEKYFFYSNLLNFFKEEVHYADGTIVKRENIEYSKDTGEIAWNKEKDFATIKKVLSYPQVNIVKKTEEQTGGLFDNNIVSKEKVVDASKLIPIKSGLSPEKYGGYARPTIAYSVLVIADIEKGKTKKLKRIKEMVGITIQDKKKFEANPIAYLEECGYKNINPNLIIKLPKYSLFEFNGGQRRLLASSIELQKGNELILPYHFTALLYHAQRINKFSEPIHKQYVEAHQNEFKELLTIIISLSKKYIQKPNVESLLHQAFEQADNDIYQLSESFISLLKLTSFGAPGAFKFLGAEISQSSVRYKPNSQFLDTTLIHQSITGLYETRIDLSKLGED

SEQ ID NO: 177 - protein, 1360 aa, Streptococcus pseudoporcinus
YSYSIGLDIGTNSVGWAVINEDYKVPAKKMTVFGNTDRKTIKKNLLGTVLFDSGETAQARRLKRTNRRRYTRRRYRLCQLQNIFATEMVKVDDTFFQRLSESFFYYQDKAFDKHPIFGNSKEERAYHKTYPTIYHLRKDLADRDQKADLRLIYLALSHIIKFRGHFLIEGKLNSENTDVQKLFIALVTVYNLLFEEEIAGETCDAKALLTAKTSKSKRLESLISEFPGQKKNGLFGNLLALALGLRPNFKSNFGLSEDAKLQITKDTYEEELDNLLAEIGDHYADLFLAAKNLSDAILLSDILTLSDENTRAPLSASMIKRYEEHQEDLALLKKLVKEQMPEKYWEIFSNAKKNGYAGYIEGKVSQEDFYRYIKPILSRLKGGDEFLAKIDRDDFLRKQRTFDNGSIPHQIHLKELHAILRRQEKYYPFLAEQKEKIEQLLCFRIPYYVGPLAKGGNSSFAWLKRRSDEPITPWNFKDVVDEEASAQAFIEGMTNYDTYLPEEKVLPKHSPLYEMFTVYNELTKVKYIAENMTKPLYLSAEQKEAIIDHLFKQTRKVTVKDLKEKYFSQIEGLENVDVTGVEGAFNASLGTYNDLLKIIKDKAFLDDEANAEILEEIVLILTLFQDEKLIEKRLAKYANLFEKSVLKKLRKRHYRGWGRLSRQLIDGMKDKASGKTILDFLKDDFANRNFIQLINDSSLDFEKLIDDAQKKAIKRESLTEAVANLAGSPAIKKGILQSLKVVDEIVKVMGHNPDNIVIEMSRENQTTAQGLKNARQRLKKIKEVHKKTGSRILEDNSERITNLTLQDNRLYLYLLQDGKDMYTGQDLDINNLSQYDIDHIIPQSFIKDNSIDNLVLTTQKANRGKSDNVPSIEVVRDMKDRVWRRQLANGAISRQKFDHLTKAERGGLADSDKARFLRRQLVETRQITKHVAQLLDSRFNSKSNQNKKLARNVKIITLKSKIVSDFRKDFGLYKLREVNNYHHAHDAYLNAVVGTALLKKYPKLEAEFVYGDYKHFDLSDPSLGKATAKVFFYSNIMNFFKEELSLADGTLMKRPVIETNTETGEVVWDKVKDFKTIRKVLSYPQVNIVKKTEIQSGAFSKESVLSKGNSDKLIERKKGWDPKKYGGFDSPNTAYSIFVVAKVAKRKAQKLKTVKEIVGITIMEQAEYEKDNIAFLEKKGYQDIQEKLLIKLPKYSLFELENGRRRLLASEFQKGNELALSGKYMKFLYLASRYDKLSSKIESEQQKKLFVEQHLHYFDEILDIVVKHATCYIKAENNLKKIISLYKKKEAYSINEQALNMLNLFIFTSLGAPSTFVFFDETIDRKRYTTSSDVLNGILIQQSITGLYETRIDLSRFGGD

SEQ ID NO: 178 - protein, 1316 aa, Streptococcus pseudoporcinus
  source 1..1316: note = SPIN 20026
MLGTVLFDSGETAQARRLKRTNRRRYTRRRYRLCQLQNIFATEMVKVDDTFFQRLSESFFYYQDKAFDKHPIFGNSKEERAYHKTYPTIYHLRKDLADRDQKADLRLIYLALSHIIKFRGHFLIEGKLNSENTDVQKLFIALVTVYNLLFEEEIAGETCDAKALLTAKTSKSKRLESLISEFPGQKKNGLFGNLLALALGLRPNFKSNFGLSEDAKLQITKDTYEEELDNLLAEIGDHYADLFLAAKNLSDAILLSDILTLSDENTRAPLSASMIKRYEEHQEDLALLKKLVKEQMPEKYWEIFSNAKKNGYAGYIEGKVSQEDFYRYIKPILSRLKGGDEFLAKIDRDDFLRKQRTFDNGSIPHQIHLKELHAILRRQEKYYPFLAEQKEKIEQLLCFRIPYYVGPLAKGGNSSFAWLKRRSDEPITPWNFKDVVDEEASAQAFIEGMTNYDTYLPEEKVLPKHSPLYEMFTVYNELTKVKYIAENMTKPLYLSAEQKEAIIDHLFKQTRKVTVKDLKEKYFSQIEGLENVDVTGVEGAFNASLGTYNDLLKIIKDKAFLDDEANAEILEEIVLILTLFQDEKLIEKRLAKYANLFEKSVLKKLRKRHYRGWGRLSRQLIDGMKDKASGKTILDFLKDDFANRNFIQLINDSSLDFEKLIDDAQKKAIKRESLTEAVANLAGSPAIKKGILQSLKVVDEIVKVMGHNPDNIVIEMSRENQTTAQGLKNARQRLKKIKEVHKKTGSRILEDNSERITNLTLQDNRLYLYLLQDGKDMYTGQDLDINNLSQYDIDHIIPQSFIKDNSIDNLVLTTQKANRGKSDNVPSIEVVRDMKDRVWRRQLANGAISRQKFDHLTKAERGGLADSDKARFLRRQLVETRQITKHVAQLLDSRFNSKSNQNKKLARNVKIITLKSKIVSDFRKDFGLYKLREVNNYHHAHDAYLNAVVGTALLKKYPKLEAEFVYGDYKHFDLSDPSLGKATAKVFFYSNIMNFFKEELSLADGTLMKRPVIETNTETGEVVWDKVKDFKTIRKVLSYPQVNIVKKTEIQSGAFSKESVLSKGNSDKLIERKKGWDPKKYGGFDSPNTAYSIFVVAKVAKRKAQKLKTVKEIVGITIMEQAEYEKDNIAFLEKKGYQDIQEKLLIKLPKYSLFELENGRRRLLASEFQKGNELALSGKYMKFLYLASRYDKLSSKIESEQQKKLFVEQHLHYFDEILDIVVKHATCYIKAENNLKKIISLYKKKEAYSINEQALNMLNLFIFTSLGAPSTFVFFDETIDRKRYTTSSDVLNGILIQQSITGLYETRIDLSRFGGD

SEQ ID NO: 179 - protein, 1359 aa, Streptococcus sanguinis
KKPYSIGLDIGTNSVGWAVVTDDYKVPAKKMRVFGDTDRSHIKKNLLGTLLFDDGNTAESRRLKRTARRRYTRRRNRILYLQEIFTESMNEIDESFFHRLDDSFLVPEDKRGSKYPIFATLQEEKEYHKQFPTIYHLRKQLADSKEKSDVRLIYLALAHMIKYRGHFLYEETFDIKNNDIQKIFNEFINIYDNTFEGSSLSGQNAQVEAIFTDKISKSAKRERVLKLFPDEKSTGLFSEFLKLIVGNQADFKKHFDLEEKAPLQFSKDTYDEELENLLGQIGDDFADLFLIAKKLYDAILLSGILTVTDPSTKAPLSASMIERYENHQKDLAALKQFIKNNLPEKYVEVFSDQSKDGYAGYIDGKTTQEAFYKYIKNLLSKFEGADYFLDKIEREDFLRKQRTFDNGSIPHQIHLQEMNAILRRQGEHYPFLKENREKIEKILTFRIPYYVGPLARDNRDFSWLTRNSDEPIRPWNFEEVVDKARSAEDFIHRMTNYDLYLPEEKVLPKHSLLYETFAVYNELTKVKFIAEGLRDYQFLDSGQKKQIVNQLFKEKRKVTEKDIIHYLHNVDGYDGIELKGIEKQFNANLSTYHDLLKITKDKEFMDDPKNEEILENIVHTLTIFEDREMIKQRLAQYDTLFDEKVIKALTRRHYTGWGKLSAKLINGIRDKQSGKTILDYLIDDDKINRNFMQLINDDGLSFKEIIQKAQVVGKTDDVKQVVQELPGSPAIKKGILQSIKIVDELVKVMGYALESIVIEMARENQTTARGKKNSQQRYKRIEDALKNLAPNILKENPTDNIQLKNDRLFLYYLQNGKDMYTGKPLDINQLSSYDIDHIIPQAFIKDDSIDNRVLTSSKDNRGKSDNVPSLEVVQKRKAFWQQLLDSKLISERKFNNLTKAERGGLDERDKVGFIRRQLVETQQITKNVAQILDARFNTEVKEKNQKIRTVKIITLKSNLVSNFRKEFGLYKVREINNYHHAHDAYLNAVVAKAILKKYPKLEPEFVYGDYQKYDLFKPSKEIEKATEKYFFYSNLLNFFKEEVLYADGTIRKRENIEYSKDTGEIAWDKEKDFATIKKVLSYPQVNIVKKREVQTGGFSKESILPKGNSDKLIPRKTKDILWDTTKYGGFDSPVIAYSILLIADIEKGKAKKLKTVKTLVGITIMEKAAFEENPITFLENKGYHNVRKENILCLPKYSLFELENGRRRLLASAKELQKGNEIVLPVCLTTLLYHSKNLHKLDEPEHLEYIQKHRNEFKDLLNLVSEFSQKYILAEANLEKIKDLYADNEQADIEILANSFINLLTFTALGAPAAFKFFGKDVDRKRYTTVSEILNATLIHQSITGLYETRIDLSKLGEE

SEQ ID NO: 180 - protein, 1362 aa, Streptococcus sanguinis
KKPYSIGLDIGTNSVGWAVITDDYKVPSKKMKVLGNTDKHFIKKNLIGALLFDEGTTAEDRRLKRTSRRRYTRRKNRLRYLQEIFSEEISKLDSSFFHRLDDSFLVPEDKRGSKYPIFATLEEEKEYHKKFPTIYHLRKHLADSKEKTDLRLIYLALAHMIKYRGHFLYEESFDIKNNDIQKIFNEFISIYDNTFEGSSLSGQNAQVEAIFTDKISKSTKRERVLKLFSDEKSTGLFSEFLKLIVGNQADFKKHFDLEEKAPLQFSKDTYDEDLENLLGQIGDGFADLFLVAKKLYDAILLSGILTVTDPSTKAPLSASMIERYENHQEDLAALKQFIKNNLSEKYAEVFSDQSKDGYAGFIDGKTTQEAFYKYIKNLLSKLEGADYFLNKIEREDFLRKQRTFDNGSIPHQIHLQEMNAILRRQGEHYLFLKENREKIEKILAFRIPYYVGPLARGNRDFAWLTRNSDQAIRPWNFEEVVDKASSAEDFINKMTNYDLYLPEEKVLPKHSLLYETFAVYNELTKVKFIAEGLRDYQFLDSGQKKQIVNQLFKDKRKVTEKDIIHYLHNVDGYDGIELKGIEKQFNASLSTYHDLLKIIKDKEFMDNPKNGEILENIIHTLTIFEDREMIKQRLAQYDTLFDEKVIKALTRRHYTGWGKLSAKLINGIRDKQTGKTILEYLIDDGDCNRNFMQLINDDGLSFKEIIQKAQVVGKTDDVKQVVQEIPGSPAIKKGILQSIKIVDELVKVMGHNPESIVIEMARENQTTAKGKKNSQQRYKRIEDALKNLAPNILKENPTDNIQLQNDRLFLYYLQNGKDMYTGKAIDINQLSNYDIDHIIPQAFIKDDSLDNRVLTSSKDNRGKSDNVPSIEVVQKRKAFWQQLLDSKLISERKFNNLTKAKRGGLDERDKVGFIKRQLVETRQITKHVAQLLDTRFNTEVNEENQKIRTVKIITLKSNLVSNFRKEFGLYKVREINDYHHAHDAYLNAVVAKAILKKYPKLEPEFVYGDYQKYDLSKASNTIDKATEKYFFYSNLLNFFKEKVRYADGTIKKRENIEYSNDTGEIAWNKEKDFATIKKVLSLPQVNIVKKTEEQTGGLFDNNIVSKKKVVDASKLIPIKSSLSPEKYGGYARPTIAYSVLVIADIEKGKGKAKKLKRIKEIVGITIQDKKKFESNPVTYLEECGYKNINSNLIIKLPKYSLFEFNDGQRRLLASSIELQKGNELILPYHLTALLYHAQRINKISEPIHKQYVEAHQNEFKELLTTIISLSKKYIQKPNVELLLQQAFDQADKDIYQLSESFISLLKLTSFGAPGAFKFLGVEISQSSVRYKPNSQFLDTTLIHQSITGLYETRIDLSKLGED

SEQ ID NO: 181 - protein, 1360 aa, Streptococcus sp.
  source 1..1360: note = F0441
ENKNYSIGLDIGTNSVGWSVITDDYKVPSKKMKVLGNTDKHFIKKNLIGALLFDEGTTAEARRLKRTARRRYTRRKNRLRYLQEIFSEEIGKVDSSFFHRLDDSFLIPEDKRGSKYPIFATLAEEKKYHKQFPTIYHLRKQLADSKEKTDLRLIYLALAHMIKYRGHFLYEEAFDIKNNDIQKIFNEFISIYNNTFEGNSLSGQNVQVEAIFTDKISKSAKRERVLKLFPDEKSTGLFSEFLKLIVGNQADFKKHFDLEEKAPLQFSRDTYDEDLENLLGQIGDDFADLFLVAKKLYDAILLSGILTVTNPSTKAPLSASMIERYENHQKDLASLKQFIKNNLPEKYDEVFSDQSEDGYAGYIDGKTTQETFYKYIKNLLSKFEGADYFLDKIEREDFLRKQRTFDNGSIPHQIHLQEMNAILRRQGEHYPFLKENKEKIEKILTFRIPYYVGPLARGNRDFAWLTRNSDQAIRPWNFEEIVDKASSAEDFINKMTNYDLYLPEEKVLPKHSLLYETFAVYNELTKVKFIAEGLRDYQFLDSGQKKQIVTQLFKEKRKVTEKDIIQFLHNVDGYDGIELKGIEKQFNASLSTYHDLLKIIKDKAFMDDAKNEAILENIVHTLTIFEDREMIKQRLAQYDSLFDEKVIKALTRRHYTGWGKLSAKLINGISDKQTGNTILDYLIDDGEINRNFMQLINDDGLSFKEIIQKAQVVGKTNDVKQVVQELPGSPAIKKGILQSIKIVDELVKVMGHAPESIVIEMARENQTTARGKKNSQQRYKRIEDSLKILASKILKEHPTDNIQLQNDRLFLYYLQNGKDMYTGEALDINQLSSCDIDHIIPQAFIKDDSLDNRVLTSSKDNRGKSDNVPSLEVVDKMKVFWQQLLDSKLISYRKFNNLTKAERGGLNELDKVGFIKRQLVETRQITKHVAQILDARFNKEVTEKDKKNRTVKIITLKSNLVSNFRKEFELYKVREINDYHHAHDAYLNAVVAKAILKKYPKLEPEFVYGDYQKYDLSKDPKEIEKATEKYFFYSNLLNFFKEEVHYADGTIVKRENIEYSKDTGEIAWNKEKDFATIKKVLSLPQVNIVKKREVQTGGFSKESILPKGNSDKLIPRKTKDILWDTTKYGGFDSPVIAYSILLIADIEKGKAKKLKTVKTLVGITIMEKDAFEKNPIAFLENKGYHNVCKENILCLPKYSLFELENGRRRLLASAKELQKCNEIVLPVYLTTLLYHSKNVHKLDEPGHLEYIQKHRNEFKDLLNLVSEFSQKYVLADANLEKIKNLYADNEQADIEILANSFINLLTFTALGAPAAFKFFGKDVDRKRYTTVSEILNATLIHQSITGLYETRIDLSKLGED

SEQ ID NO: 182 - protein, 1360 aa, Streptococcus sp.
  source 1..1360: note = FF10
MKKPYSIGLDIGTNSVGWSVVTDDYKVPAKKMKVLGNTDKEYIKKNLIGALLFDSGETAEATRMKRTARRRYTRRRNRILYLQDIFSPELNQVDESFLHRLDDSFLVAEDKRGERHVIFGNIADEVKYHKEFPTIYHLRKHLADSSEKADLRLVYLALAHIIKYRGHFLIDEPIDIRNMNSQNLFKEFLLAFDGIQVDCYLASKHTDISGIITAKISKSRKVEAVLEQFPDQKKNSFFGNMVSLVFGLMPNFKSNFELDEDAKLQFSRDSYDEDLENLLGIIGDEYADVFVAAKKVYDSILLSGILTTNNHSTKAPLSASMIDRYDEHNSDKKLLRDFIRTNIGKEVFKEVFYDTSKNGYAGYIDGKTNQEDFYKYLKNLLQKVDGGDYFIEKIEREDFLRKQRTFDNGSIPHQVHLDEMKAILRRQGEFYPFLKENAEKIQQILTFKIPYYVGPLARGNSRFAWASYNSNEKMTPWNFDNVIDKTSSAQAFIERMTNNDLYLPDQKVLPKHSLLYQKFAVYNELTKIKYVTETGEARLFDVFLKKEIFDGLFKKERKVTKKKILNFLDKNFDEFRITDIQGLDNETGNFNASYGTYHDLLKIIGDKEFMDSSDNVDVLEDIVLSLTLFEDREMIKQRLLKYEDIFSKKVIANLTRRHYTGWGRLSAKLINGIKDKHSRKTILDYLIDDGHSNRNFMQLINDDNLSFKDEIANSQVIGDGDDLHQVVQELAGSPAIKKGILQSLKIVDELVKVMGYNPEQIVVEMARENQTTARGRNNSQQRLGSLTKAIQDFGSDILKRYPVENNQLQNDQLYLYYLQNGKDMYTGDTLDIHNLSQYDIDHIIPQSFIKDNSLDNRVLTNSKSNRGKSDNVPSNEVVKRMKGFWLKQLDAKLISQRKFDNLTKAERGGLSAEDKAGFIKRQLVETRQITKHVARILDERFNRDFDKNDKRIRNVKIVTLKSNLVSNFRKEFGFYKVREINNFHHAHDAYLNAVVAKALLIRYPKLEPEFVYGEYPKYNSYRERKATEKMFFYSNIMNMFKTTIKLADGRVVEKPVIEANEETGEIAWDKTKHFANVKKVLSYPQVSIVKKVEEQTGGFSKESILPKGGSDKLIARKTKNNYLSTQKYGGFDSPTVAYSIMFVADIEKGKSKRLKTVKEMIGITIMERSRFESNSVTFLEEKGYRNIRENTIIKFPKYSLFELENGRRRLLASAIELQKGNEMFLPQQFVNLLYHAQHANKEDSVIYLEKHRHELSELFHHIIGVSEKTILKPKVEMTLNEAFEKHFEFDEVSELAQSFISLLKFTAFGAPGGFKFLDADIKQSNLRYQTVTEVLSSTLIHQSVTGLYETRIDLSKLGGE

SEQ ID NO: 183 - protein, 1364 aa, Streptococcus sp.
  source 1..1364: note = M334
SNKSYSIGLDIGTNSVGWAVITDDYKVPSKKMKVLGNTDKHFIKKNLIGALLFDEGTTAEDRRLKRTARRRYTRRKNRLRYLQEIFSQEISKVDSSFFHRLDDFFLVPEDKRGSKYPIFATLVEEKEYHKKFPTIYHLRKHLADSKEKTDLRLIYLALAHMIKYRGHFLYEESFDIKNNDIQKIFSEFISIYDNTFEGKSLSGQNAQVEAIFTDKISKSTKRERVLKLFPDEKSTGLFSEFLKLIVGNQADFKKHFDLEEKAPLQFSKDTYDEDLENLLGQIGDDFADLFLVAKKLYDAILLSGILTVKDLSTKAPLSASMIERYENHQKDLAALKQFIQNNLQEKYDEVFSDQSKDGYAGYIDGKTTQEAFYKYIKNLLSKFEGADYFLDKIEREDFLKKQRTFDNGSIPHQIHLQEMNAIIRRQGEHYPFLQENKEKIEKILTFRIPYYVGPLARGNGDFAWLTRNSDQAIRPWNFEEIVDQASSAEDFINKMTNYDLYLPEEKVLPKHSLLYETFAVYNELTKVKFIAEGLTRYQFLDKKQKKDIFDTFFKAENKRKVTEKDIIHYLHNVDGYDGIELKGIEKQFNASLSTYHDLLKIIKDKAFMDDSKNEEILENIIHTLTIFEDREMIKQRLAQYDSLFDEKVIKALTRRHYTGWGKLSAKLINGIRDKKSGKTILDYLIDDGEINRNFMQLIHDDGLSFKEIIQKAQVFGKTNDVKQVVQELPGSPAIKKGILQSIKIVDELVKVMGHAPESIVIEMARENQTTARGKKNSQQRYKRIEDSLKNLASNILKENPTDNIQLQNDRLFLYYLQNGRDMYTGKPLEINQLSNYDIDHIIPQAFIKDDSLDNRVLTSSKDNRGKSDNVPSLEVVEKMKAFWQQLLDSKLISERKFNNLTKAERERGGLNELDKVGFIKRQLVETRQITKHVAQFLDARFNKEVTEKDKKNRNVKIITLKSNLVSNFRKEFGLYKVREINDYHHAHDAYLNAVLAKAILKKYPKLEPEFVYGDYQKYDLSREPKEVEKATQKYFFYSNLLNFFKEEVHYADGTIVKRENIEYSKDTGEIAWNKEKDFATVKKVLSLPQVNIVKKTEVQTGGFSKESILPKGNSDKLIPRKTKEILWDTTKYGGFDSPVIAYSILLIADIEKGKAKKLKTVKTLVGITIMEKATFEKNPITFLENKGYHNVRKENILCLPKYSLFELESGRRRMLASAKELQKGNEIVLPVYLTTLLYHSKNVHKLDEPEHLEYIQKHRYEFKDLLNLVSEFSQKYVLADANLEKIKNLYADNEQADIEILANSFINLLTFTALGAPAAFKFLGKDVDRKRYTTVSEILNATLIHQSITGLYETRIDLSKLGED

SEQ ID NO: 184 - protein, 1360 aa, Streptococcus sp.
  source 1..1360: note = taxon 056
NNNNYSIGLDIGTNSVGWAVITDDYKVPSKKMRVLGNTDKRFIKKNLIGALLFDEGTTAEDRRLKRTARRRYTRRKNRLRYLQEIFAEEMSKVDSSFFHRLDDSFLVPEDKSGSKYPIFATLAEEKEYHKKFPTIYHLRKHLADSKEKADLRLIYLALAHITKYRGHFLYEEAFDIKNNDIQKIFNEFINIYDNTFEGSSLSGQNAQVEAIFTGKISKSVKREHVLKLFPDEKSTGLFSEFLKLIVGNQADFKKHFDLEEKASLQFSKDTYDEDLENLLGQIGDDFADLFLVAKKLYDAILLSGILTVTDPSTKAPLSASMIERYENHQEDLAALKQFIKNNLPEKYAEVFSDQSKDGYAGYIDGKTTQEAFYKYIKNLLSKFEGADYFLDKIEREDFLRKQRTFDNGSIPHQIHLQEMNAILRRQGEHYPLLKENKEKIEKILTFRIPYYVGPLARGNRDFAWLTRNSDQAIRPWNFEEIVDKASSAESFINKMTNYDLYLPEEKVLPKHSLLYETFAVYNELTKVKFIAEGLRDYQFFDSGQKKQIVNQLFKEKRKVTEKDIIHYLHNVDGYDGIELKGIEKQFNASLSTYHDLLKIIKDKEFMDNHKNQEILENIVHTLTIFEDREMIKQRLAQYDSIFDEKVIKALTRRHYTGWGKLSAKLINGICDKKTGKTILDYLIDDGYNNRNFMQLINDDGLSFKEIIQKAQVVGKTDDLTQVVRELSGSPAIKKGILQSIKIVDELVKIMGYAPESIVIEMARENQTTAKGKKNSQQRYKRIEDALKNLAPTISKENPTDNIQLQNDRLFLYYLQNGKDMYTGEALDINQLSSYDIDHIIPQAFIKDDSLDNRVLTSSKDNRGKSDNVPSLEVVKKRKAFWQQLLDSKLISERKFNNLTKAERGGLDERDKVGFIKRQLVETRQITKHVARILDARFNTEVSEKNQKIRSVKIITLKSNLVSNFRKEFKLYKVREINDYHHAHDAYLNAVVAKAILKKYPKLEPEFVYGDYQKYDLSKDPKEVEKATEKYFFYSNLLNFFKEEVHYADGTIVKRENIEYSKDTGEIAWNKEKDFVTIKKVLSYPQVNIVKKREVQTGGFSKESILPKGNSDKLIPRKTKDILWDTTKYGGFDSPVIAYSILLIADIEKGKAKKLKTVKTLVGITIMEKAAFEKNPITFLENKGYHNVRKENILCLPKYSLFELENGRRRLLASAKELQKGNEIVLPVYLTTLLYHSKNVHKLDEPEHLEYIQKHRYEFKDLLNLVSEFSQKYVLAEANLEKIKSLYVDNEQADIEILANSFINLLTFTALGAPAAFKFFGKDVDRKRYTTVSEILNATLIHQSITGLYETRIDLSKLGED

SEQ ID NO: 185 - protein, 1359 aa, Streptococcus suis
MKKKYAIGIDIGTNSVGWSVVTDDYKVPSKKMKVFGNTEKRYIKKNLLGTLLFDEGNTAENRRLKRTARRRYTRRRNRILYLQEIFAEEINKIDDSFFQRLDDSFLIVEDKQGSKHPIFGTLQEEKKYHKQFPTIYHLRKQLADSSQKADIRLIYLALAHIIKYRGHFLFEGDLKSENKDVQHLFNDFVEMFDKTVEGSYLSENLPNVADVLVEKVSKSRRLENILHYFPNEKKNGLFGNFLALALGLQPNFKTNFELAEDAKIQFSKETYEEDLEELLGKIGDDYADLFIATKSLYDGILLAGILSTTDSTTKAPLSSSMVNRYEEHKKDLALLKNFIHQNLSDSYKEVFNDKLKDGYAGYIEGKTTQENFYRFIKKAIEKIEGSDYFIDKIDREDFLRKQRTFDNGSIPHQIHLQEMHAIIRRQAEFYPFLVENQDKIEKILTFRIPYYVGPLARGKSEFAWLNRKSDEKIRPWNFDEMVDKETSAENFITRMTNYDQYLPDQKVLPKHSLLYEKFAVYNELTKVKFIAEGMRDYQFLDSGQKKDIVKTLFKTKRKVTAKDIKAYLENSNGYAGVELKGLEEQFNASLPTYHDLLKILRDKAFIDAEENQEILEDIVLTLTLFEDREMIRKRLEKYKDILTEEQRKKLERRHYTGWGRLSAKLINGILDKVTRKTILGYLIDDGTSNRNFMQLINDDTLSFVDEIRLAQGSGEAEDYRAEVQNLAGSPAIKKGILQSLKIVDELIEVMGYDPEHIVVEMARENQFTNQGRRNSQQRYKKIENAIKNLNSKILKEYPTNNQALQNDRLFLYYLQNGKDMYTDEELDIDQLSQYDIDHIIPQAFIKDDSLDNKVLTKSAKNRGKSDDVPSLEIVHKKKNFWKQLLDSQLISQRKFDNLTKAERGGLTNEDKARFIQRQLVETRQITKHVARILDTRFNTKLDEAGNRIRDPKVNIITLKSNLVSQFRKDYQLYKVREINNYHHAHDAYLNAVVATALLKKYPQLAPEFVYGDYPKYNSYKSRKATEKVLFYSNIMNFFRRVLVYSKTGEVRIRPVIEVNKETGEIVWDKKSDFRTVRKVLSYPQVNVVKKVEMQTGGFSKESILQHGDSDKLIPRKTEKFYLDTKKYGGFDSPTIAYSVLLIADIEKGKAKKLKRVKELIGITIMERMAFEKNPIEFLEHKGYKNILEKNIIKLPKYSLFELENGRRRLLASAKELQKGNEMILPPHLVTLLYHSSNIHKITEPIHLNYVNKNKHEFKELLRHISDFSTRYILAQDRLSKIEELYDKNDGDDISDLTSSFVNLLTFTAIGAPAAFKFLGSVIDRKRYTSIAEILEATLIHQSVTGLYETRIDLSKLGGD

SEQ ID NO: 186 - protein, 1361 aa, Streptococcus suis
MKKKYAIGIDIGTNSVGWSVVTDDYKVPSKKMKVFGNTEKRYIKKNLLGTLLFDEGNTAENRRLKRTARRRYTRRRNRILYLQEIFAEEINKIDDSFFQRLDDSFLIVEDKQGSKHPIFGTLQEEKEYHKQFPTIYHLRKQLADSSQKADIRLIYLALAHIIKYRGHFLFEGDLKSENKDVQHLFNDFVEMFDKTVEGSYLSENLPNVADVLVEKVSKSRRLENILHYFPNEKKNGLFGNFLTLALGLQPNFKTNFELAEDAKIQFSKETYEEDLEELLGKIGDDYADLFIATKSLYDGILLAGILSTTDSTTKAPLSSSMVNRYEEHQKDLALLKNFIHQNLSDSYKEVFNDKLKDGYAGYIEGKTTQENFYRFIKKAIEKIEGSNYFIDKIDREDFLRKQRTFDNGSIPHQIHLQEMHAIIRRQAEFYPFLVENQDKIEKILTFRIPYYVGPLARGKSEFAWLNRKSDEKIRPWNFDEMVDKETSAENFITRMTNYDQYLPDQKVLPKHSLLYEKFAVYNELTKVRYVTEQGKSFFFDANMKQEIFDGVFKVYRKVTKEKLMDFLGKEFDEFRIVDLLGLDKDNKSFNASLGTYHDLKKIVSKDLLDNPENEDILENVVLTLTLFEDREMIRKRLEKYKDVLTEEQRKKLERRHYTGWGRLSAKLINGIRDKVTRKTILDYLIDDGTSNRNFMQLINDDTLSFVDEIRLAQGSGEAEDYRAEVQNLAGSPAIKKGILQSLKIVDELIEVMGYDPEHIVVEMARENQFTNQGRRNSQQRYKKIENAIKNLNSKILKEYPTNNQALQNDRLFLYYLQNGKDMYTDEELDIDQLSQYDIDHIIPQAFIKDDSLDNKVLTKSAKNRGKSDDVPSLEIVHKKKNFWKQLLDSQLISQRKFDNLTKAERGGLTNEDKARFIQRQLVETRQITKHVARILDTRFNTKLDEAGNRIRDPKVNIITLKSNLVSQFRKDYQLYKVREINNYHHAHDAYLNAVVATALLKKYPQLAPEFVYGDYPKYNSYKSRKATEKVLFYSNIMNFFRRVLVYSKTGEVRIRPVIEVNKETGEIVWDKKSDFRTVRKVLSYPQVNVVKKVEMQTGGFSKESILQHGDSDKLIPRKTEKFYLDTKKYGGFDSPTIAYSVLLIADIEKGKAKKLKRVKELIGITIMERMAFEKNPIEFLEHKGYKNILEKNIIKLPKYSLFELENGRRRLLASAKELQKGNEMILPPHLVTLLYHSSNIHKITEPIHLNYVNKNKHEFKELLRHISDFSTRYILAQDRLSKIEELYDKNDGDDISDLTSSFVNLLTFTAIGAPAAFKFLGSVIDRKRYTSIAEILEATLIHQSVTGLYETRIDLSKLGGD

SEQ ID NO: 187 - protein, 1361 aa, Streptococcus suis
MKKKYAIGIDIGTNSVGWSVVTDDYKVPSKKMKVFGNTEKRYIKKNLLGTLLFDEGNTAENRRLKRTARRRYTRRRNRILYLQEIFAEEINKIDDSFFQRLDDSFLIVEDKQGSKHPIFGTLQEEKEYHKQFPTIYHLRKQLADSSQKADIRLIYLALAHIIKYRGHFLFEGDLKSENKDVQHLFNDFVEMFDKTVEGSYLSENLPNVADVLVEKVSKSRRLENILHYFPNEKKNGLFGNFLALALGLQPNFKTNFELAEDAKIQFSKETYEEDLEELLGKIGDDYADLFIATKSLYDGILLAGILSTTDSTTKAPLSSSMVNRYEEHQKDLALLKNFIHQNLSDSYKEVFNDKLKDGYAGYIEGKTTQENFYRFIKKAIEKIEGSNYFIDKIDREDFLRKQRTFDNGSIPHQIHLQEMHAIIRRQAEFYPFLVENQDKIEKILTFRIPYYVGPLARGKSEFAWLNRKSDEKIRPWNFDEMVDKETSAENFITRMTNYDQYLPDQKVLPKHSLLYEKFAVYNELTKVRYVTEQGKSFFFDANMKQEIFDGVFKVYRKVTKEKLMDFLGKEFDEFRIVDLLGLDKDNKSFNASLGTYHDLKKIVSKDLLDNPENEDILENVVLTLTLFEDREMIRKRLEKYKDVLTEEQRKKLERRHYTGWGRLSAKLINGIRDKVTRKTILDYLIDDGTSNRNFMQLINDDTLSFVDEIRLAQGSGEAEDYRAEVQNLAGSPAIKKGILQSLKIVDELIEVMGYDPEHIVVEMARENQFTNQGRRNSQQRYKKIENAIKNLNSKILKEYPTNNQALQNDRLFLYYLQNGKDMYTDEELDIDQLSQYDIDHIIPQAFIKDDSLDNKVLTKSAKNRGKSDDVPSLEIVHKKKNFWKQLLDSQLISQRKFDNLTKAERGGLTNEDKARFIQRQLVETRQITKHVARILDTRFNTKLDEAGNRIRDPKVNIITLKSNLVSQFRKDYQLYKVREINNYHHAHDAYLNAVVATALLKKYPQLAPEFVYGDYPKYNSYKSRKATEKVLFYSNIMNFFRRVLVYSKTGEVRIRPVIEVNKETGEIVWDKKSDFRTVRKVLSYPQVNVVKKVEMQTGGFSKESILQHGDSDKLIPRKTEKFYLDTKKYGGFDSPTIAYSVLLIADIEKGKAKKLKRVKELIGITIMERMAFEKNPIEFLEHKGYKNILEKNIIKLPKYSLFELENGRRRLLASAKELQKGNEMILPPHLVTLLYHSSNIHKITEPIHLNYVNKNKHEFKELLRHISDFSTRYILAQDRLSKIEELYDKNDGDDISDLTSSFVNLLTFTAIGAPAAFKFLGSVIDRKRYTSIAEILEATLIHQSVTGLYETRIDLSKLGGD

SEQ ID NO: 188 - protein, 1359 aa, Streptococcus suis
MKKKYAIGIDIGTNSVGWSVVTDDYKVPSKKMKVFGNTEKRYIKKNLLGTLLFDEGNTAENRRLKRTARRRYTRRRNRILYLQEIFAEEINKIDDSFFQRLDDSFLIVEDKQGSKHPIFGTLQEEKKYHKQFPTIYHLRKQLADSSQKADIRLIYLALAHIIKYRGHFLFEGDLKSENKDVQHLFNDFVEMFDKTVEGSYLSENLPNVADVLVEKVSKSRRLENILHYFPNEKKNGLFGNFLALALGLQPNFKTNFELAEDAKIQFSKETYEEDLEELLGKIGDDYADLFIATKSLYDGILLAGILSTTDSTTKAPLSSSMVNRYEEHKKDLALLKNFIHQNLSDSYKEVFNDKLKDGYAGYIEGKTTQENFYRFIKKAIEKIEGSDYFIDKIDREDFLRKQRTFDNGSIPHQIHLQEMHAIIRRQAEFYPFLVENQDKIEKILTFRIPYYVGPLARGKSEFAWLNRKSDEKIRPWNFDEMVDKETSAENFITRMTNYDQYLPDQKVLPKHSLLYEKFAVYNELTKVKFIAEGMRDYQFLDSGQKKDIVKTLFKTKRKVTAKDIKAYLENSNGYAGVELKGLEEQFNASLPTYHDLLKILRDKAFIDAEENQEILEDIVLTLTLFEDREMIRKRLEKYKDILTEEQRKKLERRHYTGWGRLSAKLINGILDKVTRKTILGYLIDDGTSNRNFMQLINDDTLSFVDEIRLAQGSGEAEDYRAEVQNLAGSPAIKKGILQSLKIVDELIEVMGYDPEHIVVEMARENQFTNQGRRNSQQRYKKIENAIKNLNSKILKEYPTNNQALQNDRLFLYYLQNGKDMYTDEELDIDQLSQYDIDHIIPQAFIKDDSLDNKVLTKSAKNRGKSDDVPSLEIVHKKKNFWKQLLDSQLISQRKFDNLTKAERGGLTNEDKARFIQRQLVETRQITKHVARILDTRFNTKLDEAGNRIRDPKVNIITLKSNLVSQFRKDYQLYKVREINNYHHAHDAYLNAVVATALLKKYPQLAPEFVYGDYPKYNSYKSRKATEKVLFYSNIMNFFRRVLVYSKTGEVRIRPVIEVNKETGEIVWDKKSDFKTVRKVLSYPQVNVVKKVEMQTGGFSKESILQHGDSDKLIPRKTEKFYLDTKKYGGFDSPTIAYSVLLIADIEKGKAKKLKRVKELIGITIMERMAFEKNPIEFLEHKGYKNILEKNIIKLPKYSLFELENGRRRLLASAKELQKGNEMILPPHLVTLLYHSSNIHKITEPIHLNYVNKNKHEFKELLRHISDFSTRYILAQDRLSKIEELYDKNDGDDISDLTSSFVNLLTFTAIGAPAAFKFLGSVIDRKRYTSIAEILEATLIHQSVTGLYETRIDLSKLGGD

SEQ ID NO: 189 - protein, 1351 aa, Streptococcus suis
MDQKYSIGLDIGTNSVGWAVVTDDYKVPAKKMKVLGNTDKQSIKKNLLGALLFDSGETAEATRLKRTARRRYTRRRNRLRYLQEIFAEEMNKVDENFFQRLDDSFLVDEDKRGERHPIFGNIAAEVKYHDDFPTIYHLRKHLADISQKADLRLVYLALAHMIKFRGHFLIEGQLKAENTNVQALFKDFVEVYDKTVEESHLSEMTVDALSILTEKVSKSRRLENLIAHYPAEKKNTLFGNLIALSLGLQPNFKTNFQLSEDAKLQFSKDTYEEDLEGLLGEIGDEYADLFASAKNLYDAILLSGILTVDDNSTKAPLSASMVKRYEEHQKDLKKLKDFIKVNAPDQYNAIFKDKNKKGYAGYIENGVKQDEFYKYLKGILLQINGSGDFLDKIDREDFLRKQRTFDNGSIPHQIHLQEMHAILRRQEEHYPFLKENQDKIEKILTFRIPYYVGPLARKGSRFAWAEYKADEKITPWNFDDILDKEKSAEKFITRMTLNDLYLPEEKVLPKHSLLYETFTVYNELTKVKYVNEQGEAKFFDANMKQEIFDHVFKENRKVTKDKLLNYLGKEFDEFRIVDLTGLDKENKVFNSSLGTYHDLRKILDKSFLDNKENEQIIEDIIQTLTLFEDREMIRQRLQKYSDIFTKAQLKKLERCHYTGWGRLSYKLINGIRNKENKKTILDYLIDDGYANRNFMQLINDDALSFKEEIAKAQVIGETDDLNQVVSDIAGSPAIKKGILQSLKIVDELVKVMGYNPANIVIEMARENQTTDKGRRNSQQRLKLLQDSLKPVNIKNVENQQLQNDRLFLYYIQNGKDMYTGETLDINNLSQYDIDHIIPQAFIKDDSFDNRVLTSSSENRGKSDNVPSIEVVRARKADWMRLRKAGLISQRKFDNLTKAERGGLTENDKAGFIKRQLVETRQITKHVAQVLDARFNAKHDENKKVIRDVKIITLKSNLVSQFRKDFKFYKVREINDYHHAHDAYLNAVIGTALLKKYPKLASEFVYGEFKKYDVSDKEIGKATAKYFFYSNLMNFFKKEVKFADGTVVERPDIETSEDGEIAWNKQTDFKIVRKVLSYPQVNIVKKTEVQTHGLDRPSPKPKPDSSENLVGVKRNLDPKKYGGYAGISNSYAVLVKAIIEKGVKKKETMVLEFQGISILDRITFEKDKRAFLLGKGYKDIKKIIELPKYSLFELKDGSRRMLASRGEIHKGNELFVPQKFTTLLYHAKRINNPINKDHIEYVKKHRDDFKELLNYVLEFNEKYVGATKNGERLKEAVADFDSKSNEEICTSFLGLFELTSLGSASDFEFLGVKIPRYRDYTPSSLLKDSTLIHQSITGLYETRIDLSKLGED

SEQ ID NO: 190 - protein, 1256 aa, Brochothrix thermosphacta
MWGVSLFEAGKTAAERRGYRSTRRRLNHRKFRLRLLEDMFEKEILSKDPSFFIRLKEAFLSPKDEQKQFLFNDKDYTDADYYEQYKTIYHLRYDLISQHRQFDIREVYLAIHHLIKYRGHFIYEDQTFTTDGNQLQHHIKAIITMINSTLNRIIPETIDINVFEKILLDRMMNRSSKVKFLIELTGKQDKPLLKELFNLIVGLKAKPASIFEQENLATIVETMNMSTEQVQLDLLTLADVLADEEYDLLLTAQKIYSAIILDESMDGYEYFAEAKKESYRKHQEELVLVKKMLKSNAITNDERAKFEYFYTDYIGYEESKSKEERLFKHIELLLAKENVLTTVEHALLEKNITFASLLPLQRSSRNAVIPYQVHEKELVAILENQATYYPFLLEQKDNIHKLLTFRIPYYVGPLADQKDSEFAWMVRKQAGKITPFNFEEMVDIDASSEAFIKRMTNKCTYLIHEDVIPKHSFSYAKFEVLNELNKIRLDGKPIDIPLKKRIFEGLFLEKTKVTQTSLKKWLAEHEHMTVSVVQGTQKETEFATSLQAFHRFVKIFDRETVSNPANEEMFEKIIYWSTVFEDKKIMRRKLSEYPQLTEQQQVQLAQVRFRGWGRLSQRLINRIKTPEDHKLSINEILQTNENFMQIIRNKDYLFKKIIEEQFENETALLNKQRIDELAASPANKKGIWQAIKIVKELEKVLQQPAENIFIEFARSDEESKRSTPRDKFIEKAYAETDTEHLKELKQRSKQLSSQRLFLYFIQNGKCMYSGEHLDIERLDSYEVDHILPQSYIKDNSIENLALVKKVENQRKKDSLLLNSSIINQNYSRWEQLKNAGLIGEKKFRNLTRTKITDRDKEGFIARQLVETRQITKHVTQLLQQEYKDTTKVFAIKATLVSGLRRKFEFIKNRNVNDYHHAQDAFLVAFLGTNITSNYPKIEMEYLFKGYQHYLNEVGKAAKPKFTFIVENLSKQQNSTTGEVKWNPEVDIAKLKRILNFKQCNIVRKVEEQSGALFKETIYPVEESSSKTIPLKKHLDTAIYGGYTAVNYASYALIQFKKGRKLKREIIGIPLAVQTRIDNSETSLQAYIAEQIKSEVEILNGRILKYQLISNNGNRLYIAGSERHNARQLIVSDEAAKVIWLISTKQADEAMFLKYYRLEHLEAVFEELIRKQAADYQIFEKLIKKIEVNFYSCTYNEKVKVIELLKITQANATNGDLKLLKMSNREGRLGSVSVALDFKIINQSVTGLYQSIEDYNN

SEQ ID NO: 191 - protein, 1290 aa, Catenibacterium mitsuokai
IVDYCIGLDLGTGSVGWAVVDMNHRLMKRNGKHLWGSRLFSNAETAANRRASRSIRRRYNKRRERIRLLRAILQDMVLEKDPTFFIRLEHTSFLDEEDKAKYLGDNYNLFIDEDFNDYTYYHKYPTIYHLRKALCESTEKADPRLIYLALHHIVKYRGNFLYEGQKFNMDASNIEDKLSDIFTQFTSFNNIPYEDDKKNLEILEILKKPLSKKAKVDEVMTLIAPEKDYKSAFKELVTGIAGNKMNVTKMILCEPIKQGDSEIKLKFSDSNYDDQFSEVEKDLGEYVEFVDALHNVYSWVELQTIMGATHTDNASISEAMVSRYNKHHDDLKLLKDCIKNNVPNKYFDMFRNDSEKSKGYYNYINRKAPVDEFYKYVKKCIEKVDTPEAKQILNDIELENFLLKQNSRTNGSVPYQMQLDEMIKIIDNQAEYYPILKEKREQLLSILTFRIPYYFGPLETSEHAWIKRLEGKENQRILPWNYQDIVDVDATAEGFIKRMRSYCTYFPDEEVLPKNSLIVSKYEVYNELNKIRVDDKLLEVDVKNDIYNELFMKNKTVTEKKLKNWLVNNQCCSKDAEIKGFQKENQFSTSLTPWIDFTNIFGKIDQSNFDLIENIIYDLTVFEDKKIMKRRLKKKYALPDDKVKQILKLKYKDWSRLSKKLLDGIVADSVTVLDVLESRLNLMEIINDKDLGYAQMIEEATSCPEDGKFTYEEVERLAGSPALKRGIWQSLQIVEEITKVMKCRPKYIYIEFERSEEKERTESKIKKLENVYKDEQTSVLEELKGFDNTKKISSDSLFLYFTQLGKCMYSGKKLDIDSLDKYQIDHIVPQSLVKDDSFDNRVLVVPSENQRKLDDLVVPFDIRDKMYRFWKLLFDHELISPKKFYSLIKTEYTERDEERFINRQLVETRQITKNVTQIIEDHYSTTKVAAIRANLSHEFRVKNHIYKNRDINDYHHAHDAYIVALIGGFMRDRYPNMHDSKAVYSEYMKMFRNKNDQKGFVINSMNYPYEVDGKLIWNPDLINEIKKCFYYKDCYCTTKLDQKSGQLFNTVLSNDAHADKGAVVPVNKNRSDVHKYGGFSGLQYTIVAIEGQKKKGKKTELVKKISGVPLHLKAASINEKINYIEEKEGLSDVRIIKDNIPVNQMIEMDGGEYLLTSEYVNARQLVLNEKQCALIADIYNAIYKQDYDNLDDILMIQLYIELTNKMKVLYPAYRGIAEKFESYVVISKEEKANIIQMLIVMHRGPQNGNIVYDDFKISDRIGRLKTKNHNLNIVFISQSPTGIYTKKYKL

SEQ ID NO: 192 - protein, 1359 aa, synthetic construct; identical to SEQ ID NO: 10
  REGION 1..1359: note = Synthetic polypeptide

SEQ ID NO: 193 - protein, 1313 aa, unidentified
  source 1..1313: note = Clostridiales bacterium S5-A11
MKNYTIGLDIGTNSVGWAVIKDDLTLVRKKIKISGNTDKKEVKKNLWGSFLFEQGDTAQDTRVKRIARRRYERRRFRIRELQKIFDKSMGEVDSNFFHRLDESFLVEEDKEYSKYPIFSNEKEDKNYYDKYPTIYHLRKDLADSNQKADLRLIYLALAHMIKYRGHFLIEGDLKMDGISISESFQEFIDSYNEVCALEDENNDELLTQIENIFKQDISRSKKLDQAIALFQGKRQSLFGIFLTLIVGNKANFQKIFNLEDDIKLDLKEEDYDENLEELLSNIDEGYRDVFLQAKNVYNAIELSKILKTDGKETKAPLSAQMVELYNQHREDLKKYKDYIKAYLPEKYGETFKDATKNGYAGYIDGKTSQEDFYKFVKAQLKGEENGEYFLEAIENENFLRKQRSFYNGVIPYQIHLQELTAVLDQQEKHYSFLKENRDKIISLLTFRIPYYVGPLAKGESRFAWLERSNSEEKIKPWNFDKIVDIDKSAELFIENLTSRDTYLPDEPVLPKRSLIYQKFTIFNELTKISYIDERGILQNFSSREKIAIFNDLFKNKSKVTKNQLVKYIENKEQIIAPEIKGIEDSFNSNYSTYIDLDMKLLEKDEDEILEEIIKILTIFEDRKMRKRQLMKFKDKLSEKAINQLSKKHYTGWGQLSEKLINGIRDEQSNKTILDYLIDNGCPKNMNRNFMQLINDDTLSFKEKIRKAQDINQVNDIKEIVKDLPGSPAIKKGIYQSIRIVDEIIRKMKDRPKNIVIEMARENQTTQEGKNKSKARLKKIQEGLENLDSHVEKQALDEEMLKSPKYYLYCLQNGKDIYTGKDLDIGQLQTYDIDHIIPRSFITDNSFDNLVLTSSTVNRGKLDNVPSPDIVRQQKGFWKQLLRAGLMSQRKFNNLTKGKLTDRDRQQFINRQLVETRQITKHVANLLSHHLNEKKEVGEINIVLLKSALTSQFRKKFDFYKVREVNDYHHAHDAYLNGVIALKLLELYPYMAKDLIYGKYSYHRKGDKATQAKYKMSNIIERFSQDLLANPDGEIAWEKDKDLNTIRKVLSSKQINIIKKAEEGKGRLFKETINSRPSKKTEKRIPIKNNLDPNIYGGYIEEKMAYYIAINYLENGKTKKAIVGISIKDKKDFEGQTTEYLGKIGFNKASIINSFKNYTLFELENGSRRMIVGKGELQKGNQMYLPQNLLEFVYHLKHYNEDETSHKFIVEHKAYFDELLNYIVEFANKYLELENSIEKIKDLYHGKGPDVEEKELVESFINLLAITKCGPAADITFLGEKISRKRYRSTNCLWGSEVIFQSPTGLYETRLRLE

SEQ ID NO: 194 - protein, 1359 aa, synthetic construct; identical to SEQ ID NO: 10
  REGION 1..1359: note = Synthetic polypeptide

SEQ ID NO: 195 - protein, 1327 aa, Dolosigranulum pigrum
MQKNYTIGLDIGTNSVGWAVMKDDYTLIRKRMKVLGNTDIKKIKKNFWGVRLFDEGETAKETRLKRGTRRRYQRRRNRLIYLQDIFQQPMLAIDENFFHRLDDSFFVPDDKSYDRHPIFGSLEEEVAYHNTYPTIYHLRKHLADNPEKADLRLVYTALAHIVKYRGHFLIEGELNTENTSISETFEQFLDTYSDIFKEQLVGDISKVEEILSSKQSRSRKHEQIMALFPNENKLGNFGRFMMLIVGNTSNFKPVFDLDDEYKLKLSDETYEEDLDTLLGMTDDVFLDVFMAAKNVYDAVEMSAIISTDTGNSKAVLSNQMINFYDEHKVDLAQLKQFFKTHLPDKYYECFSDPSKNGYAGYIDGKTNQEDFYKYIEKVMKTIKSDKKDYFLDKIDREVFLRKQRSFYNSVIPHQIHLQEMQAILDRQSQYYPFLAENRDKIESLVTFRIPYYVGPLTVSDQSEFAWMERQSDEPIRPWNFDEIVNKERSAEKFIERMTNMDTYLLEEKVLPKRSLLYQTFEVYNELTKVRYTNEQGKTEKLNRQQKAEIIETLFKQKNRVREKDIANYLEQYGYVDGTDIKGVEDKFNASLSTYNDLAKIDGAKAYLDDPEYADVWEDIIKILTIFEDKAMRKKQLQTYSDTLSPEILKKLERKHYTGWGRFSKKLINGLRDEGSNKTILDYLKDEGSSGPTNRNFMQLIRDNTLSFKKKIEDAQTIEDTTHIYDTVAELPGSPAIKKGIRQALKIVEEIIDIIGYEPENIVVEMARESQTTKKGKDLSKERLEKLTEAIKEFDGVKVKDLKNENLRNDRLYLYYLQNGRDMYTNEPLDINNLSKYDIDHIIPQSFTTDNSIDNKVLVSRTKNQGNKSDDVPSINIVHKMKPFWRQLHKAGLISDRKFKNLTKAEHGGLTEADRAHFLNRQLVETRQITKHVANLLDSQYNTAEEQRINIVLLKSSMTSRFRKEFKLYKVREINDYHHGHDAYLNAVVATTIMKVYPNLKPQFVYGQYKKTSMFKEEKATARKHFYSNITKFFKKEKVVNEETGEILWDTERHLSTIKRVLSWKQMNIVKKVEKQKGQLWKETIYPKGDSSKLIPVKEGMDPQKYGGLSQVSEAFAVVITHEKGKKKQLKSDLISIPIVDQKAYEQHPTAYLEEAGYNNPTVLHELFKYQLFELEDGSRRMIASAKEFQKGNQMVLPLELVELLYHANRYDKVKFPDSIEYVHDNLAKFDDLLEYVIDFSNKYINADKNVQKIQKIYKEHGTEDVELTVESFVNLMTFTAMGAPATFKFYGESITRSRYTSITEFRGSTLIFQSITGLYETRYKLED

SEQ ID NO: 196 - protein, 1329 aa, synthetic construct
  REGION 1..1329: note = Synthetic polypeptide
MKKDYVIGLDIGTNSVGWAVMTEDYQLVKKKMPIYGNTEKKKIKKNFWGVRLFEEGHTAEDRRLKRTARRRISRRRNRLRYLQAFFEEAMTDLDENFFARLQESFLVPEDKKWHRHPIFAKLEDEVAYHETYPTIYHLRKKLADSSEQADLRLIYLALAHIVKYRGHFLIEGKLSTENISVKEQFQQFMIIYNQTFVNGESPLPESVLIEEELTEKASRTKKSEKVLQQFPQEKANGLFGQFLKLMVGNKADFKKVFGLEEEAKITYASESYEEDLEGILAKVGDEYSDVFLAAKNVYDAVELSTILADSDKKSHAKLSSSMIVRFTEHQEDLKKFKRFIRENCPDEYDNLFKNEQKDGYAGYIAHAVSQLKFYQYVKKIIQDIAGAEYFLEKIAQENFLRKQRTFDNGVIPHQIHLAELQAIIHRQAAYYPFLKENQEKIEQLVTFRIPYYVGPLSKGDASTFAWLKRQSEEPIRPWNLQETVDLDQSATAFIERMTNFDTYLPSEKVLPKHSLLYEKFMVFNELTKISYTDDRGIKANFSGKEKEKIFDYLFKTRRKVKKKDIIQFYRNEYNTEIVTLSGLEEDQFNASFSTYQDLLKCGLTRAELDHPDNAEKLEDIIKILTIFEDRQRIRTQLSTFKGQFSAEVLKKLERKHYTGWGRLSKKLINGIYDKESGKTILGYLIDDGVSKHYNRNFMQLINDSQLSFKNAIQKAQSSEHEETLSETVNELAGSPAIKKGIYQSLKIVDELVAIMGYAPKRIVVEMARENQTTSTGKRRSIQRLKIVEKAMAEIGSNLLKEQPTTNEQLRDTRLFLYYMQNGKDMYTGDELSLHRLSHYDIDHIIPQSFMKDDSLDNLVLVGSTENRGKSDDVPSKEVVKDMKAYWEKLYAAGLISQRKFQRLTKGEQGGLTLEDKAHFIQRQLVETRQITKNVAGILDQRYNANSKEKKVQIITLKASLTSQFRSIFGLYKVREVNDYHHGQDAYLNCVVATTLLKVYPNLAPEFVYGEYPKFQTFKENKATAKAIIYTNLLRFFTEDEPRFTKDGEILWSNSYLKTIKKELNYHQMNIVKKVEVQKGGFSKESIKPKGPSNKLIPVKNGLDPQKYGGFDSPIVAYTVLFTHEKGKKPLIKQEILGITIMEKTRFEQNPILFLEEKGFLRPRVLMKLPKYTLYEFPEGRRRLLASAKEAQKGNQMVLPEHLLTLLYHAKQCLLPNQSESLAYVEQHQPEFQEILERVVDFAEVHTLAKSKVQQIVKLFEANQTADVKEIAASFIQLMQFNAMGAPSTFKFFQKDIERARYTSIKEIFDATIIYQSTTGLYETRRKVVD

SEQ ID NO: 197 - protein, 1280 aa, synthetic construct
  REGION 1..1280: note = Synthetic polypeptide
MRLFEEGHTAEDRRLKRTARRRISRRRNRLRYLQAFFEEAMTDLDENFFARLQESFLVPEDKKWHRHPIFAKLEDEVAYHETYPTIYHLRKKLADSSEQADLRLIYLALAHIVKYRGHFLIEGKLSTENTSVKDQFQQFMVIYNQTFVNGESPLPESVLIEEELTEKASRTKKSEKVLQQFPQEKANGLFGQFLKLMVGNKADFKKVFGLEEEAKITYASESYEEDLEGILAKVGDEYSDVFLAAKNVYDAVELSTILADSDKKSHAKLSSSMIVRFTEHQEDLKKFKRFIRENCPDEYDNLFKNEQKDGYAGYIAHAVSQLKFYQYVKKIIQDIAGAEYFLEKIAQENFLRKQRTFDNGVIPHQIHLAELQAIIHRQAAYYPFLKENQEKIEQLVTFRIPYYVGPLSKGDASTFAWLKRQSEEPIRPWNLQETVDLDQSATAFIERMTNFDTYLPSEKVLPKHSLLYEKFMVFNELTKISYTDDRGIKANFSGKEKEKIFDYLFKTRRKVKKKDIIQFYRNEYNTEIVTLSGLEEDQFNASFSTYQDLLKCGLTRAELDHPDNAEKLEDIIKILTIFEDRQRIRTQLSTFKGQFSAEVLKKLERKHYTGWGRLSKKLINGIYDKESGKTILDYLVDDGVSKHYNRNFMQLINDSQLSFKNAIQKAQSSEHEETLSETVNELAGSPAIKKGIYQSLKIVDELVAIMGYAPKRIVVEMARENQTTSTGKRRSIQRLKIVEKAMAEIGSNLLKEQPTTNEQLRDTRLFLYYMQNGKDMYTGDELSLHRLSHYDIDHIIPQSFMKDDSLDNLVLVGSTENRGKSDDVPSKEVVKDMKAYWEKLYAAGLISQRKFQRLTKGEQGGLTLEDKAHFIQRQLVETRQITKNVAGILDQRYNAKSKEKKVQIITLKASLTSQFRSIFGLYKVREVNDYHHGQDAYLNCVVATTLLKVYPNLAPEFVYGEYPKFQTFKENKATAKAIIYTNLLRFFTEDEPRFTKDGEILWSNSYLKTIKKELNYHQMNIVKKVEVQKGGFSKESIKPKGPSNKLIPVKNGLDPQKYGGFDSPVVAYTVLFTHEKGKKPLIKQEILGITIMEKTRFEQNPILFLEEKGFLRPRVLMKLPKYTLYEFPEGRRRLLASAKEAQKGNQMVLPEHLLTLLYHAKQCLLPNQSESLAYVEQHQPEFQEILERVVDFAEVHTLAKSKVQQIVKLFEANQTADVKEIAASFIQLMQFNAMGAPSTFKFFQKDIERARYTSIKEIFDATIIYQSPTGLYETRRKVVD

SEQ ID NO: 198 - protein, 1072 aa, Enterococcus durans
  source 1..1072: note = IPLA 655
MDEEAKIQLSKESYEEELESLLEKSGEEFRDVFLQAKKVYDAILLSDILSTKKQNSKAKLSLGMIERYDSHKKDLEELKQFVKANLPEKTAIFFKDSSKNGYAGYIDGKTTQEDFYKFLKKELNGIAGSERFMEKVDQENFLLKQRTTANGVIPHQVHLTELKAIIERQKPYYPSLEEARDKMIRLLTFRIPYYVGPLAQGEETSSFAWLERKTPEKVTPWNATEVIDYSASAMKFIQRMINYDTYLPTEKVLPKHSILYQKYTIFNELTKVAYKDERGIKHQFSSKEKREIFKELFQKQRKVTVKKLQQFLSANYNIEDAEILGVDKAFNSSYATYHDFLDLAKPNELLEQPEMNAMFEDIVKILTIFEDREMIRTQLKKYQSVLGDGFFKKLVKKHYTGWGRLSERLINGIRDKKTNKTILDYLIDDDFPYNRNRNFMQLINDDSLSFKEELANELALAGNQSLLEVVEALLGSPAIKKGIWQTLKIVEELIEIIGYNPKNIVVEMARENQRTNRSKPRLKALEEALKSFDSPLLKEQPVDNQALQKDRLYLYYLQNGKDMYTGEALDIDRLSEYDIDHIIPRSFIVDNSIDNKVLVSSKENRLKMDDVPDQKVVIRMRRYWEKLLRANLISERKFAYLTKLELTPEDKARFIQRQLVETRQITKHVAAILDQYFNQPEESKNKGIRIITLKSSLVSQFRKTFGINKVREINNHHHAHDAYLNGVVAIALLKKYPKLEPEFVYGNYTKFNLATENKATAKKEFYSNILRFFEKEEYSYDENGEIFWDKARHIPQIKKVISSHQVNIVKKVEVQTGGFYKETVNPKGKPDKLIQRKAGWDVSKYGGFGSPVVAYAVAFIYEKGKARKKAKAIEGITIMKQSLFEQDPIGFLSNKGYSNVTKFIKLSKYTLYELENGRRRMVASKEAQKANSFILPEKLVTLLYHAQHYDEIAHKESFDYVNDHLSEFREILDQVIDFSNRYTIAAKNTEKIAELFEQNQESTVQSLSQSFINLMQLNAMGAPADFKFFDVIIPRKRYPSLTEIWESTIIYQSITGLRETRTRMATLWDGEQ

SEQ ID NO: 199 - protein, 1329 aa, Enterococcus faecalis
MKKDYVIGLDIGTNSVGWAVMTEDYQLVKKKMPIYGNTEKKKIKKNFWGVRLFEEGHTAEDRRLKRTARRRISRRRNRLRYLQAFFEEAMTDLDENFFARLQESFLVPEDKKWHRHPIFAKLEDEVAYHETYPTIYHLRKKLADSSEQADLRLIYLALAHIVKYRGHFLIEGKLSTENTSVKEQFQQFMVIYNQTFVNGESPLPESVLIEEELTEKASRTKKSEKVLQQFPQEKANGLFGQFLKLMVGNKADFKKVFGLEEEAKITYASESYEEDLEGILAKVGDEYSDVFLAAKNVYDAVELSTILADSDKKSHAKLSSSMIVRFTEHQEDLKKFKRFIRENCPDEYDNLFKNEQKDGYAGYIAHAVSQLKFYQYVKKIIQDIAGAEYFLEKIAQENFLRKQRTFDNGVIPHQIHLAELQAIIHRQAAYYPFLKENQEKIEQLVTFRIPYYVGPLSKGDASTFAWLKRQSEEPIRPWNLQETVDLDQSATAFIERMTNFDTYLPSEKVLPKHSLLYEKFMVFNELTKISYTDDRGIKANFSGKEKEKIFDYLFKTRRKVKKKDIIQFYRNEYNTEIVTLSGLEEDQFNASFSTYQDLLKCGLTRAELDHPDNAEKLEDIIKILTIFEDRQRIRTQLSTFKGQFSAEVLKKLERKHYTGWGRLSKKLINGIYDKESGKTILDYLVDDGVSKHYNRNFMQLINDSQLSFKNAIQKAQSSEHEETLSETVNELAGSPAIKKGIYQSLKIVDELVAIMGYAPKRIVVEMARENQTTSTGKRRSIQRLKIVEKAMAEIGSNLLKEQPTTNEQLRDTRLFLYYMQNGKDMYTGDELSLHRLSHYDIDHIIPQSFMKDDSLDNLVLVGSTENRGKSDDVPSKKVVKKMKAYWEKLYAAGLISQRKFQRLTKGEQGGLTLEDKAHFIQRQLVETRQITKNVAGILDQRYNAKSKEKKVQIITLKASLTSQFRSIFGLYKVREVNDYHHGQDAYLNCVVATTLLKVYPNLAPEFVYGEYPKFQAFKENKATAKTIIYTNLMRFFTEDEPRFTKDSEILWSNSYLKTIKKELNYHQMNIVKKVEVQKGGFSKESIKPKGPSNKLIPVKNGLDPQKYGGFDSPVVAYTVLFTHEKGKKPLIKQEILGITIMEKTRFEQNPILFLEEKGFLRPRVLMKLPKYTLYEFPEGRRRLLASAKEAQKGNQMVLPEHLLTLLYHAKQCLLPNQSESLAYVEQHQPEFQEILERVVDFAEVHTLAKSKVQQIVKLFEANQTADVKEIAASFIQLMQFNAMGAPSTFKFFQKDIERARYTSIKEIFDATIIYQSTTGLYETRRKVVD

SEQ ID NO: 200 - protein, 1329 aa, Enterococcus faecalis
MKKDYVIGLDIGTNSVGWAVMTEDYQLVKKKMPIYGNTEKKKIKKNFWGVRLFEEGHTAEDRRLKRTARRRISRRRNRLRYLQAFFEEAMTALDENFFARLQESFLVPEDKKWHRHPIFAKLEDEVAYHETYPTIYHLRKKLADSSEQADLRLIYLALAHIVKYRGHFLIEGKLSTENISVKEQFQQFMIIYNQTFVNGESPLPESVLIEEELTEKASRTKKSEKVLQQFPQEKANGLFGQFLKLMVGNKADFKKVFGLEEEAKITYASESYEEDLEGILAKVGDEYSDVFLAAKNVYDAVELSTILADSDKKSHAKLSSSMIVRFTEHQEDLKNFKRFIRENCPDEYDNLFKNEQKDGYAGYITHAVSQLKFYQYVKKIIQDIAGAEYFLEKIAQENFLRKQRTFDNGVIPHQIHLAELQAIIHRQAAYYPFLKENQEKIEQLVTFRIPYYVGPLSKGDANTFAWLKRQSEEPIRPWNLQETVDLDQSATAFIERMTNFDTYLPSEKVLPKHSLLYEKFMVFNELTKISYTDDRGIKANFSGKEKEKIFDYLFKTRRKVKKKDIIQFYRNEYNTEIVTLSGLEEDQFNASFSTYQDLLKCGLTRAELDHPDNAEKLEDIIKILTIFEDRQRIRTQLSTFKGQFSAEVLKKLERKHYTGWGRLSKKLINGIYDKESGKTILDYLIDDGVSKHYNRNFMQLINDSQLSFKNAIQKAQSSEHEETLSETVNELAGSPAIKKGIYQSLKIVDELVAIMGYAPKRIVVEMARENQTTSTGKRRSIQRLKIVEKAMAEIGSNLLKEQPTTNEQLRDTRLFLYYMQNGKDMYTGDELSLHRLSHYDIDHIIPQSFMKDDSLDNLVLVGSTENRGKSDDVPSKEVVKDMKAYWEKLYAAGLISQRKFQRLTKGEQGGLTLEDKAHFIQRQLVETRQITKNVAGILDQRYNAKSKEKKVQIITLKASLTSQFRSIFGLYKVREVNDYHHGQDAYLNCVVATTLLKVYPNLAPEFVYGEYPKFQTFKENKATAKAIIYTNLLRFFTEDEPRFTKDGEILWSNSYLKTIKKELNYHQMNIVKKVEVQKGGFSKESIKPKGPSNKLIPVKNGLDPQKYGGFDSPIVAYTVLFTHEKGKKPLIKQEILGITIMEKTRFEQNPILFLEEKGFLRPRVLMKLPKYTLYQFPEGRRRLLASAKEAQKGNQMVLPEHLLTLLYHAKQCLLPNQSESLAYVEQHQPEFQEILERVVDFAEVHTLAKSKVQQIVKLFEANQTADVKEIAASFIQLMQFNAMGAPSTFKFFQKDIERARYTSIKEIFDATIIYQSTTGLYETRRKVVD

SEQ ID NO: 201 - protein, 1329 aa, Enterococcus faecalis
MKKDYVIGLDIGTNSVGWAVMTEDYQLVKKKMPIYGNTEKKKIKKNFWGVRLFEEGHTAEDRRLKRTARRRISRRRNRLRYLQAFFEEAMTALDENFFARLQESFLVPEDKKWHRHPIFAKLEDEVAYHETYPTIYHLRKKLADSSEQADLRLIYLALAHIVKYRGHFLIEGKLSTENISVKEQFQQFMIIYNQTFVNGESPLPESVLIEEELTEKASRTKKSEKVLQQFPQEKANGLFGQFLKLMVGNKADFKKVFGLEEEAKITYASESYEEDLEGILAKVGDEYSDVFLAAKNVYDAVELSTILADSDKKSHAKLSSSMIVRFTEHQEDLKNFKRFIRENCPDEYDNLFKNEQKDGYAGYITHAVSQLKFYQYVKKIIQDIAGAEYFLEKIAQENFLRKQRTFDNGVIPHQIHLAELQAIIHRQAAYYPFLKENQEKIEQLVTFRIPYYVGPLSKGDASTFAWLKRQSEEPIRPWNLQETVDLDQSATAFIERMTNFDTYLPSEKVLPKHSLLYEKFMVFNELTKISYTDDRGIKANFSGKEKEKIFDYLFKTRRKVKKKDIIQFYRNEYNTEIVTLSGLEEDQFNASFSTYQDLLKCGLTRAELDHPDNAEKLEDIIKILTIFEDRQRIRTQLSTFKGQFSAEVLKKLERKHYTGWGRLSKKLINGIYDKESGKTILDYLVDDGVSKHYNRNFMQLINDSQLSFKNAIQKAQSSEHEETLSETVNELAGSPAIKKGIYQSLKIVDELVAIMGYAPKRIVVEMARENQTTSTGKRRSIQRLKIVEKAMAEIGSNLLKEQPTTNEQLRDTRLFLYYMQNGKDMYTGDELSLHRLSHYDIDHIIPQSFMKDDSLDNLVLVGSTENRGKSDDVPSKEVVKDMKAYWEKLYAAGLISQRKFQRLTKGEQGGLTLEDKAHFIQRQLVETRQITKNVAGILDQRYNAKSKEKKVQIITLKASLTSQFRSIFGLYKVREVNDYHHGQDAYLNCVVATTLLKVYPNLAPEFVYGEYPKFQTFKENKATAKAIIYTNLLRFFTEDEPRFTKDGEILWSNSYLKTIKKELNYHQMNIVKKVEVQKGGFSKESIKPKGPSNKLIPVKNGLDPQKYGGFDSPIVAYTVLFTHEKGKKPLIKQEILGITIMEKTRFEQNPILFLEEKGFLRPRVLMKLPKYTLYEFPEGRRRLLASAKEAQKGNQMVLPEHLLTLLYHAKQCLLPNQSESLAYVEQHQPEFQEILERVVDFAEVHTLAKSKVQQIVKLFEANQTADVKEIAASFIQLMQFNAMGAPSTFKFFQKDIERARYTSIKEIFDATIIYQSTTGLYETRRKVVD

SEQ ID NO: 202 - protein, 1329 aa, Enterococcus faecalis
MKKDYVIGLDIGTNSVGWAVMTEDYQLVKKKMPIYGNTEKKKIKKNFWGVRLFEEGHTAEDRRLKRTARRRISRRRNRLRYLQAFFEEAMTDLDENFFARLQESFLVPEDKKWHRHPIFAKLEDEVAYHETYPTIYHLRKKLADSSEQADLRLIYLALAHIVKYRGHFLIEGKLSTENISVKEQFQQFMIIYNQTFVNGESPLPESVLIEEELTEKASRTKKSEKVLQQFPQEKANGLFGQFLKLMVGNKADFKKVFGLEEEAKITYASESYEEDLEGILAKVGDEYSDVFLAAKNVYDAVELSTILADSDKKSHAKLSSSMIVRFTEHQEDLKKFKRFIRENCPDEYDNLFKNEQKDGYAGYIAHAVSQLKFYQYVKKIIQDIAGAEYFLEKIAQENFLRKQRTFDNGVIPHQIHLAELQAIIHRQAAYYPFLKENQEKIEQLVTFRIPYYVGPLSKGDASTFAWLKRQSEEPIRPWNLQETVDLDQSATAFIERMTNFDTYLPSEKVLPKHSLLYEKFMVFNELTKISYTDDRGIKANFSGKEKEKIFDYLFKTRRKVKKKDIIQFYRNEYNTEIVTLSGLEEDQFNASFSTYQDLLKCGLTRAELDHPDNAEKLEDIIKILTIFEDRQRIRTQLSTFKGQFSAEVLKKLERKHYTGWGRLSKKLINGIYDKESGKTILDYLVDDGVSKHYNRNFMQLINDSQLSFKNAIQKAQSSEHEETLSETVNELAGSPAIKKGIYQSLKIVDELVAIMGYAPKRIVVEMARENQTTSTGKRRSIQRLKIVEKAMAEIGSNLLKEQPTTNEQLRDTRLFLYYMQNGKDMYTGDELSLHRLSHYDIDHIIPQSFMKDDSLDNLVLVGSTENRGKSDDVPSKEVVKDMKAYWEKLYAAGLISQRKFQRLTKGEQGGLTLEDKAHFIQRQLVETRQITKNVAGILNQRYNANSKEKKVQIITLKASLTSQFRSIFGLYKVREVNDYHHGQDAYLNCVVATTLLKVYPNLAPEFVYGEYPKFQTFKENKATAKAIIYTNLLRFFTEDEPRFTKDGEILWSNSYLKTIKKELNYHQMNIVKKVEVQKGGFSKESIKPKGPSNKLIPVKNGLDPQKYGGFDSPVVAYTVLFTHEKGKKPLIKQEILGITIMEKTRFEQNPILFLEEKGFLRPRVLMKLPKYTLYEFPEGRRRLLASAKEAQKGNQMVLPEHLLTLLYHAKQCLLPNQSESLAYVEQHQPEFQEILERVVDFAEVHTLAKSKVQQIVKLFEANQTADVKEIAASFIQLMQFNAMGAPSTFKFFQKDIERARYTSIKEIFDATIIYQSTTGLYETRRKVVD

SEQ ID NO: 203 - protein, 1331 aa, Enterococcus faecalis
MKKDYVIGLDIGTNSVGWAVMTEDYQLVKKKMPIYGNTEKKKIKKNFWGVRLFEEGHTAEDRRLKRTARRRISRRRNRLRYLQAFFEEAMTALDENFFARLQESFLVPEDKKWHRHPIFAKLEDEVAYHETYPTIYHLRKKLADSSEQADLRLIYLALAHIVKYRGHFLIEGKLSTENISVKEQFQQFMIIYNQTFVNGESPLPESVLIEEELTEKASRTKKSEKVLQQFPQEKANGLFGQFLKLMVGNKADFKKVFGLEEEAKIKITYASESYEEDLEGILAKVGDEYSDVFLAAKNVYDAVELSTILADSDKKSHAKLSSSMIVRFTEHQEDLKNFKRFIRENCPDEYDNLFKNEQKDGYAGYIAHAVSQLKFYQYVKKIIQDIAGAEYFLEKIAQENFLRKQRTFDNGVIPHQIHLAELQAIIHRQAAYYPFLKENQKKIEQLVTFRIPYYVGPLSKGDASTFAWLKRQSEEPIRPWNLQETVDLDQSATAFIERMTNFDTYLPSEKVLPKHSLLYEKFMVFNELTKISYTDDRGIKANFSGKEKEKIFDYLFKTRRKVKKKDIIQFYRNEYNTEIVTLSGLEEDQFNASFSTYQDLLKCGLTRAELDHPDNAEKLEDIIKILTIFEDRQRIRTQLSTFKGQFSEEVLKKLERKHYTGWGRLSKKLINGIYDKESGKTILDYLIDDGVSKHYNRNFMQLINDSQLSFKNAIQKAQSSEHEETLSETVNELAGSPAIKKGIYQSLKIVDELVAIMGYAPKRIVVEMARENQTTSTGKRRSIQRLKIVEKAMAEIGSNLLKEQPTTNEQLRDTRLFLYYMQNGKDMYTGDELSLHRLSHYDIDHIIPQSFMKDDSLDNLVLVGSTENRGKSDDVPSKEVVKKMKAYWEKLYAAGLISQRKFQRLTKGEQGGLTLEDKAHFIQRQLVETRQITKNVAGILDQRYNAKSKEKKVQIITLKASLTSQFRSIFGLYKVREVNDYHHGQDAYLNCVVATTLLKVYPNLAPEFVYGEYPKFQAFKENKATAKAIIYTNLLRFFTEDEPRFTKDGEILWSNSYLKTIKKELNYHQMNIVKKVEVQKGGFSKESIKPKGPSNKLIPVKNGLDPQKYGGFDSPVVAYTVLFTHEKGKKPLIKQEILGITIMEKTRFEQNPILFLEEKGFLRPRVLMKLPKYTLYEFPEGRRRLLASAKEAQKGNQMVLPEHLLTLLYHAKQCLLPNQSESLAYVEQHQPEFQEILERVVDFAEVHTLAKSKVQQIVKLFEANQTADVKEIAASFIQLMQFNAMGAPSTFKFFQKDIERARYTSIKEIFDATIIYQSTTGLYETRRKVVD

SEQ ID NO: 204 - protein, 1329 aa, Enterococcus faecalis
MKKDYVIGLDIGTNSVGWAVMTEDYQLVKKKMPIYGNTEKKKIKKNFWGVRLFEEGHTAEDRRLKRTARRRISRRRNRLRYLQAFFEEAMTALDENFFARLQESFLVPEDKKWHRHPIFAKLEDEVAYHETYPTIYHLRKKLADSSEQADLRLIYLALAHIVKYRGHFLIEGKLSTENISVKEQFQQFMIIYNQTFVNGESPLPESVLIEEELTEKASRTKKSEKVLQQFPQEKANGLFGQFLKLMVGNKADFKKVFGLEEEAKITYASESYEEDLEGILAKVGDEYSDVFLAAKNVYDAVELSTILADSDKKSHAKLSSSMIVRFTEHQEDLKKFKRFIRENCPDEYDNLFKNEQKDGYAGYIAHAVSQLKFYQYVKKIIQDIAGAEYFLEKIAQENFLRKQRTFDNGVIPHQIHLAELQAIIHRQAAYYPFLKENQEKIEQLVTFRIPYYVGPLSKGDASTFAWLKRQSEEPIRPWNLQETVDLDQSATAFIERMTNFDTYLPSEKVLPKHSLLYEKFMVFNELTKISYTDDRGIKANFSGKEKEKIFDYLFKTRRKVKKKDIIQFYRNEYNTEIVTLSGLEEDQFNASFSTYQDLLKCGLTRAELDHPDNAEKLEDIIKILTIFEDRQRIRTQLSTFKGQFSAEVLKKLERKHYTGWGRLSKKLINGIYDKESGKTILGYLIDDGVSKHYNRNFMQLINDSQLSFKNAIQKAQSSEHEETLSETVNELAGSPAIKKGIYQSLKIVDELVAIMGYAPKRIVVEMARENQTTSTGKRRSIQRLKIVEKAMAEIGSNLLKEQPTTNEQLRDTRLFLYYMQNGKDMYTGDELSLHRLSHYDIDHIIPQSFMKDDSLDNLVLVGSTENRGKSDDVPSKEVVKDMKAYWEKLYAAGLISQRKFQRLTKGEQGGLTLEDKAHFIQRQLVETRQITKNVAGILDQRYNAKSKEKKVQIITLKASLTSQFRSIFGLYKVREVNDYHHGQDAYLNCVVATTLLKVYPNLAPEFVYGEYPKFQTFKENKATAKAIIYTNLLRFFTEDEPRFTKDGEILWSNSYLKTIKKELNYHQMNIVKKVEVQKGGFSKESIKPKGPSNKLIPVKNGLDPQKYGGFDSPIVAYTVLFTHEKGKKPLIKQEILGITIMEKTRFEQNPILFLEEKGFLRPRVLMKLPKYTLYEFPEGRRRLLASAKEAQKGNQMVLPEHLLTLLYHAKQCLLPNQSESLAYVEQHQPEFQEILERVVDFAEVHTLAKSKVQQIVKLFEANQTADVKEIAASFIQLMQFNAMGAPSTFKFFQKDIERARYTSIKEIFDATIIYQSTTGLYETRRKVVD

SEQ ID NO: 205 - protein, 1329 aa, Enterococcus faecalis
MKKDYVIGLDIGSNSVGWAVMTEDYQLVKKKMPIYGNTEKKKIKKNFWGVRLFEEGHTAEDRRLKRTARRRISRRRNRLRYLQAFFEEAMTDLDENFFARLQESFLVPEDKKWHRHPIFAKLEDEVAYHETYPTIYHLRKKLADSSEQADLRLIYLALAHIVKYRGHFLIEGKLSTENTSVKDQFQQFMVIYNQTFVNGESPLPESVLIEEELTEKASRTKKSEKVLQQFPQEKANGLFGQFLKLMVGNKADFKKVFGLEEEAKITYASESYEEDLEGILAKVGDEYSDVFLAAKNVYDAVELSTILADSDKKSHAKLSSSMIVRFTEHQEDLKNFKRFIRENCPDEYDNLFKNEQKDGYAGYITHAVSQLKFYQYVKKIIQDIAGAEYFLEKIAQENFLRKQRTFDNGVIPHQIHLAELQAIIHRQAAYYPFLKENQEKIEQLVTFRIPYYVGPLSKGDASTFAWLKRQSEEPIRPWNLQETVDLDQSATAFIERMTNFDTYLPSEKVLPKHSLLYEKFMVFNELTKISYTDDRGIKANFSGKEKEKIFDYLFKTRRKVKKKDIIQFYRNEYNTEIVTLSGLEEDQFNASFSTYQDLLKCGLTRAELDHPDNAEKLEDIIKILTIFEDRQRIRTQLSTFKGQFSAEVLKKLERKHYTGWGRLSKKLINGIYDKESGKTILDYLIDDGVSKHYNRNFMQLINDSQLSFKNAIQKAQSSEHEETLSETVNELAGSPAIKKGIYQSLKIVDELVAIMGYAPKRIVVEMARENQTTSTGKRRSIQRLKIVEKAMAEIGSNLLKEQPTTNEQLRDTRLFLYYMQNGKDMYTGDELSLHRLSHYDIDHIIPQSFMKDDSLDNLVLVGSTENRGKSDDVPSKEVVKDMKAYWEKLYAAGLISQRKFQRLTKGEQGGLTLEDKAHFIQRQLVETRQITKNVAGILDQLYNAKSKEKKVQIITLKASLTSQFRSIFGLYKVREVNDYHHGQDAYLNCVVATTLLKVYPNLAPEFVYGEYPKFQTFKENKATAKTIIYTNLMRFFTEDEPRFTKDGEILWSNSYLKTIKKELNYHQMNIVKKVEVQKGGFSKESIKPKGPSNKLIPVKNGLDPQKYGGFDSPVVAYTVLFTHEKGKKPLIKQEILGITIMEKTRFEQNPILFLEEKGFLRPRVLMKLPKYTLYEFPEGRRRLLASAKEAQKGNQMVLPEHLLTLLYHAKQCLLPNQSESLAYVEQHQPEFQEILERVVDFAEVHTLAKSKVQQIVKLFEANQTADVKEIAASFIQLMQFNAMGAPSTFKFFQKDIERARYTSIKEIFDATIIYQSTTGLYETRRKVVD

SEQ ID NO: 206 - protein, 1329 aa, Enterococcus faecalis
MKKDYVIGLDIGTNSVGWAVMTEDYQLVKKKMPIYGNTEKKKIKKNFWGVRLFEEGHTAEDRRLKRTARRRISRRRNRLRYLQAFFEEAMTALDENFFARLQESFLVPEDKKWHRHPIFAKLEDEVAYHETYPTIYHLRKKLADSSEQADLRLIYLALAHIVKYRGHFLIEGKLSTENISVKEKFQQFMIIYNQTFVNGEGPLPESVLIEEELTEKASRTKKSEKVLQQFPQEKANGLFGQFLKLMVGNKADFKKVFGLEEEAKITYASESYEEDLEGILAKVGDEYSDVFLAAKNVYDAVELSTILADSDKKSYAKLSSSMIVRFTEHQEDLKKFKRFIRENCPDEYDNLFKNEQKDGYAGYIAHAVSQLKFYQYVKKIIQDIAGAEYFLEKIAQENFLRKQRTFDNGVIPHQIHLAELQAIIHRQAAYYPFLKENQEKIEQLVTFRIPYYVGPLSKGDASTFAWLKRQSEEPIRPWNLQETVDLDQSATAFIERMTNFDTYLPSEKVLPKHSLLYEKFMVFNELTKISYTDDRGIKANFSGKEKEKIFDYLFKTRRKVKKKDIIQFYRNEYNTEIVTLSGLEEDQFNASFSTYQDLLKCGLTRAELDHPDNAEKLEDIIKILTIFEDRQRIRTQLSTFKGQFSAEVLKKLERKHYTGWGRLSKKLINGIYDKESGKTILDYLVDDGVSKHYNRNFMQLINDSQLSFKNAIQKAQSSEHEETLSETVNELAGSPAIKKGIYQSLKIVDELVAIMGYAPKRIVVEMARENQTTSTGKRRSIQRLKIVEKAMAEIGSNLLKEQPTTNEQLRDTRLFLYYMQNGKDMYTGDELSLHRLSHYDIDHIIPQSFMKDDSLDNLVLVGSTENRGKSDDVPSKEVVKDMKAYWEKLYAAGLISQRKFQRLTKGEQGGLTLEDKAHFIQRQLVETRQITKNVAGILDQRYNAKSKEKKVQIITLKASLTSQFRSIFGLYKVREVNDYHHGQDAYLNCVVATTLLKVYPNLAPEFVYGEYPKFQTFKENKATAKAIIYTNLLRFFTEDEPRFTKDGEILWSNSYLKTIKKELNYHQMNIVKKVEVQKGGFSKESIKPKGPSNKLIPVKNGLDPQKYGGFDSPIVAYTVLFTHEKGKKPLIKQEILGITIMEKTRFEQNPILFLEEKGFLRPRVLMKLPKYTLYEFPEGRRRLLASAKEAQKGNQMVLPEHLLTLLYHAKQCLLPNQSESLAYVEQHQPEFQEILERVVDFAEVHTLAKSKVQQIVKLFEANQTADVKEIAASFIQLMQFNAMGAPSTFKFFQKDIERARYTSIKEIFDATIIYQSTTGLYETRRKVVD

SEQ ID NO: 207 - protein, 1329 aa, Enterococcus faecalis
MKKDYVIGLDIGTNSVGWAVMTEDYQLVKKKMPIYGNTEKKKIKKNFWGVRLFEEGHTAEDRRLKRTARRRISRRRNRLRYLQAFFEEAMTALDENFFARLQESFLVPEDKKWHRHPIFAKLEDEVAYHETYPTIYHLRKKLADSSEQADLRLIYLALAHIVKYRGHFLIEGKLSTENISVKDQFQQFMVIYNQTFVNGESPLPESVLIEEELTEKASRTKKSEKVLQQFPQEKANGLFGQFLKLMVGNKADFKKVFGLEEEAKITYASESYEEDLEGILAKVGDEYSDVFLAAKNVYDAVELSTILADSDKKSHAKLSSSMIVRFTEHQEDLKNFKRFIRENCPDEYDNLFKNEQKDGYAGYIAHAVSQLKFYQYVKKIIQDIAGAEYFLEKIAQENFLRKQRTFDNGVIPHQIHLAELQAIIHRQAAYYPFLKENQKKIEQLVTFRIPYYVGPLSKGDASTFAWLKRQSEEPIRPWNLQETVDLDQSATAFIERMTNFDTYLPSEKVLPKHSLLYEKFMVFNELTKISYTDDRGIKANFSGKEKEKIFDYLFKTRRKVKKKDIIQFYRNEYNTEIVTLSGLEEDQFNASFSTYQDLLKCGLTRAELDHPDNAEKLEDIIKILTIFEDRQRIRTQLSTFKGQFSAEVLKKLERKHYTGWGRLSKKLINGIYDKESGKTILDYLIDDGVSKHYNRNFMQLINDSQLSFKNAIQKAQSSEHEETLSETVNELAGSPAIKKGIYQSLKIVDELVAIMGYAPKRIVVEMARENQTTSTGKRRSIQRLKIVEKAMAEIGSNLLKEQPTTNEQLRDTRLFLYYMQNGKDMYTGDELSLHRLSHYDIDHIIPQSFMKDDSLDNLVLVGSTENRGKSDDVPSKEVVKKMKAYWEKLYAAGLISQRKFQRLTKGEQGGLTLEDKAHFIQRQLVETRQITKNVAGILDQRYNAKSKEKKVQIITLKASLTSQFRSIFGLYKVREVNDYHHGQDAYLNCVVATTLLKVYPNLAPEFVYGEYPKFQAFKENKAMAKAIIYTNLLRFFTEDEPRFTKDGEILWSNSYLKTIKKELNYHQMNIVKKVEVQKGGFSKESIKPKGPSNKLIPVKNGLDPQKYGGFDSPVVAYTVLFTHEKGKKPLIKQEILGITIMEKTRFEQNPILFLEEKGFLRPRVLMKLPKYTLYEFPEGRRRLLASAKEAQKGNQMVLPERLLTLLYHAKQCLLPNQSESLAYVEQHQPEFQEILERVVDFAEVHTLAKSKVQQIVKLFEANQTADVKEIAASFIQLMQFNAMGAPSTFKFFQKDIERARYTSIKEIFDATIIYQSTTGLYETRRKVVD

SEQ ID NO: 208 - protein, 1329 aa, Enterococcus faecalis
MKKDYVIGLDIGTNSVGWAVMTEDYQLVKKKMPIYGNTEKKKIKKNFWGVRLFEEGHTAEDRRLKRTARRRISRRRNRLRYLQAFFEEAMTALDENFFARLQESFLVPEDKKWHRHPIFAKLEDEVAYHETYPTIYHLRKKLADSSEQADLRLIYLALAHIVKYRGHFLIEGKLSTENISVKEQFQQFMIIYNQTFVNGESPLPESVLIEEELTEKASRTKKSEKVLQQFPQEKANGLFGQFLKLMVGNKADFKKVFGLEEEAKITYASESYEEDLEGILAKVGDEYSDVFLAAKNVYDAVELSTILADSDKKSHAKLSSSMIVRFTEHQEDLKKFKRFIRENCPDEYDNLFKNEQKDGYAGYIAHAVSQLKFYQYVKKIIQDIAGAEYFLEKIAQENFLRKQRTFDNGVIPHQIHLAELQAIIHRQAAYYPFLKENQEKIEQLVTFRIPYYVGPLSKGDASTFAWLKRQNEKPIRPWNLQETVDLDQSATAFIERMTNFDTYLPSEKVLPKHSLLYEKFMVFNELTKISYTDDRGIKANFSGKEKEKIFDYLFKTRRKVKKKDIIQFYRNEYNTEIVTLSGLEEDQFNASFSTYQDLLKCGLTRAELDHPDNAEKLEDIIKILTIFEDRQRIRTQLSTFKGQFSAEVLKKLERKHYTGWGRLSKKLINGIYDKESGKTILDYLIDDGVSKHYNRNFMQLINDSQLSFKNAIQKAQSSEHEETLSETVNELAGSPAIKKGIYQSLKIVDELVAIMGYAPKRIVVEMARENQTTSTGKRRSIQRLKIVEKAMAEIGSNLLKEQPTTNEQLRDTRLFLYYMQNGKDMYTGDELSLHRLSHYDIDHIIPQSFMKDDSLDNLVLVGSTENRGKSDDVPSKEVVKKMKAYWEKLYAAGLISQRKFQRLTKGEQGGLTLEDKAHFIQRQLVETRQITKNVAGILDQRYNAKSKEKKVQIITLKASLTSQFRSIFGLYKVREVNDYHHGQDAYLNCVVATTLLKVYPNLAPEFVYGEYPKFQAFKENKATAKAIIYTNLMRFFTEVEPRFTKDGEILWSNSYLKTIKKELNYHQMNIVKKVEVQKGGFSKESIKPKGPSNKLIPVKNGLDPQKYGGFDSPVVAYTVLFTHEKGKKPLIKQEILGITIMEKTKFEQNPILFLEEKGFLRPRVLMKLPKYTLYEFPEGRRRLLASAKEAQKGNQMVLPEHLLTLLYHAKQCLLPNQSESLAYVEQHQPEFQEILERVVDFAEVHTLAKSKVQQIVKLFETNQTADVKEIAASFIQLMQFNAMGAPSTFKFFQKDIERARYTSIKEIFDATIIYQSTTGLYETRRKVVD

SEQ ID NO: 209 - protein, 1329 aa, Enterococcus faecalis
MKKDYVIGLDIGTNSVGWAVMTEDYQLVKKKMPIYGNTEKKKIKKNFWGVRLFEEGHTAEDRRLKRTARRRISRRRNRLRYLQAFFEEAMTALDENFFARLQESFLVPEDKKWHRHPIFAKLEDEVAYHETYPTIYHLRKKLADSSEQADLRLIYLALAHIVKYRGHFLIEGKLSTENISVKEQFQQFMIIYNQTFVNGESPLPESVLIEEELTEKASRTKKSEKVLQQFPQEKANGLFGQFLKLMVGNKADFKKVFGLEEEAKITYASESYEEDLEGILAKVGDEYSDVFLAAKNVYDAVELSTILADSDKKSHAKLSSSMIVRFTEHQEDLKNFKRFIRENCPDEYDNLFKNEQKDGYAGYIAHAVSQLKFYQYVKKIIQDIAGAEYFLEKIAQENFLRKQRTFDNGVIPHQIHLAELQAIIHRQAAYYPFLKENQKKIEQLVTFRIPYYVGPLSKGDASTFAWLKRQSEEPIRPWNLQETVDLDQSATAFIERMTNFDTYLPSEKVLPKHSLLYEKFMVFNELTKISYTDDRGIKANFSGKEKEKIFDYLFKTRRKVKKKDIIQFYRNEYNTEIVTLSGLEEDQFNASFSTYQDLLKCGLTRAELDHPDNAEKLEDIIKILTIFEDRQRIRTQLSTFKGQFSEEVLKKLERKHYTGWGRLSKKLINGIYDKESGKTILDYLIDDGVSKHYNRNFMQLINDSQLSFKNAIQKAQSSEHEETLSETVNELAGSPAIKKGIYQSLKIVDELVAIMGYAPKRIVVEMARENQTTSTGKRRSIQRLKIVEKAMAEIGSNLLKEQPTTNEQLRDTRLFLYYMQNGKDMYTGDELSLHRLSHYDIDHIIPQSFMKDDSLDNLVLVGSTENRGKSDDVPSKEVVKKMKAYWEKLYAAGLISQRKFQRLTKGEQGGLTLEDKAHFIQRQLVETRQITKNVAGILDQRYNAKSKEKKVQIITLKASLTSQFRSIFGLYKVREVNDYHHGQDAYLNCVVATTLLKVYPNLAPEFVYGEYPKFQAFKENKATAKAIIYTNLLRFFTEDEPRFTKDGEILWSNSYLKTIKKELNYHQMNIVKKVEVQKGGFSKESIKPKGPSNKLIPVKNGLDPQKYGGFDSPVVAYTVLFTHEKGKKPLIKQEILGITIMEKTRFEQNPILFLEEKGFLRPRVLMKLPKYTLYEFPEGRRRLLASAKEAQKGNQMVLPEHLLTLLYHAKQCLLPNQSESLAYVEQHQPEFQEILERVVDFAEVHTLAKSKVQQIVKLFEANQTADVKEIAASFIQLMQFNAMGAPSTFKFFQKDIERARYTSIKEIFDATIIYQSTTGLYETRRKVVD

SEQ ID NO: 210 - protein, 1328 aa, Enterococcus faecium
MKKEYTIGLDIGTNSVGWSVLTDDYRLVSKKMKVAGNTEKSSTKKNFWGVRLFDEGQTAEARRSKRTARRRLARRRQRILELQKIFAPEILKIDEHFFARLNESFLVLDEKKQSRHPVFATIKQEKSYHQTYPTIYHLRQALADSSEKADIRLVYLAMAHLLKYRGHFLIEGELNTENSSVTETFRQFLSTYNQQFSEADKLDEAVDCSFVFTEKMSKTKKAETLLKYFPHEKSNGYLSQFIKLMVGNQGNFKNVFGLEEAKLQFSKETYEEDLEELLEKIGDDYIDLFVQAKNVYDAVLLSEILSDSTKNTRAKLSAGMIRRYDAHKEDLVLLKRFVKENLPKKYRAFFGDNSVNGYAGYIEGHATQEDFYKFVKKELTGIRGSEVFLTKIEQENFLRKQRTFDNGVIPHQIHLTELRAIIANQKKHYPFLKEEQEKLESLLTFKIPYYVGPLAKKQENSPFAWLIRKSEEKIKPWNLPEIVDMEGSAVRFIERMINTDMYMPHNKVLPKNSLLYQKFSIYNELTKVRYQDERGQMNYFSSIEKKEIFHELFEKNRKVTKKDLQEFLYLKYDIKHAELSGIEKAFNASYTTYHDFLTMSENKQWLEDPELASMFEEIIKTLTVFEDREMIKTRLSHHEATLGKHIIKKLTKKHYTGWGRLSKELIQGIRDKQSNKTILDYLIDDDFPHHRNRNFMQLINDDSLSFKKEIKKAQMITDTENLEEIVKELTGSPAIKKGILQSLKIVDEIVGIMGYEPANIVVEMARENQTTGRGLKSSRPRLKALEESLKDFGSQLLKEYPTDNSSLQKDRLYLYYLQNGRDMYTGAPLDIHRLSDYDIDHIIPRSFTTDNSIDNKVLVSSKENRLKKDDVPSEKVVKKMRSFWYDLYSSKLISKRKLDNLTKIKLTEEDKAGFIKRQLVETRQITKHVAGILHHRFNKAEDTNEPIRKVRIITLKSALVSQFRNRFGIYKVREINEYHHAHDAYLNGVVALALLKKYPQLAPEFVYGEYLKFNAHKANKATVKKEFYSNIMKFFESDTPVCDENGEIFWDKSKSIAQVKKVINHHHMNIVKKTEIQKGGFSKETVEPKKDSSKLLPRKNNWDPAKYGGLGSPNVAYTVAFTYEKGKARKRTNALEGITIMEREAFEQSPVLFLKNKGYEQAEIEMKLPKYALFELENGRKRMVASKEAQKANSFLLPEHLVTLLYHAKQYDEISHKESFDYVNEHHKEFSEVFARVLEFAGKYTLAEKNIEKLEKIYKENQTDDLAKLASSFVNLMQFNAMGAPADFKFFDVTIPRKRYTSLTEIWQSTIIHQSITGLYETRIRMGK

SEQ ID NO: 211 - protein, 1329 aa, Enterococcus faecium
MKKEYTIGLDIGTNSVGWSVLTDDYRLVSKKMKVAGNTEKSSTKKNFWGVRLFDEGQTAEARRSKRTARRRLARRRQRILELQKIFAPEILKIDEHFFARLNESFLVPDEKKQSRHPVFATIKQEKSYHQTYPTIYHLRQALADSSEKADIRLVYLAMAHLLKYRGHFLIEGELNTENSSVTETFRQFLSTYNQQFSEAGKLDEAVDCSFVFTEKMSKTKKAETLLKYFPHEKSNGYLSQFIKLMVGNQGNFKNVFGLEEEAKLQFSKETYEEDLEELLEKIGDDYIDLFVQAKNVYDAVLLSEILSDSTKNTRAKLSAGMIRRYDAHKEDLVLLKRFVKENLPKKYRAFFGDNSVNGYAGYIEGHATQEAFYKFVKKELTGIRGSEVFLTKIEQENFLRKQRTFDNGVIPHQIHLSELRAIIANQKKHYPFLKEEQEKLESLLTFKIPYYVGPLAKKQENSPFAWLIRKSEEKIKPWNLPEIVDMEGSAVRFIERMINTDMYMPHNKVLPKNSLLYQKFSIYNELTKVRYQDERGQMNYFSSIEKKEIFHELFEKNRKVTKKDLQEFLYLKYDIKHAELSGIEKAFNASYTTYHDFLTMSENKQWLEDPELASMFEEIIKTLTVFEDREMIKTRLSHHEATLGKHIIKKLTKKHYTGWGRLSKELIQGIRDKQSNKTILDYLIDDDFPHHRNRNFMQLINDDSLSFKKEIKKAQMITDTENLEEIVKELTGSPAIKKGILQSLKIVDEIVGIMGYEPANIVVEMARENQTTGRGLKSSRPRLKALEESLKDFGSQLLKEYPTDNSSLQKDRLYLYYLQNGRDMYTGAPLDIHRLSDYDIDHIIPRSFTTDNSIDNKVLVSSKENRLKKDDVPSEKVVKKMRSFWYDLYSSKLISKRKLDNLTKIKLTEEDKAGFIKRQLVETRQITKHVAGILHHRFNKAEDTNDPIRKVRIITLKSALVSQFRNRFGIYKVREINEYHHAHDAYLNGVVALALLKKYPQLAPEFVYGEYLKFNAHKANKATVKKEFYSNIMKFFESDTPVCDENGEIFWDKSKSIAQVKKVINHHHMNIVKKTEIQKGGFSKETVEPKKDSSKLLPRKNNWDPAKYGGLGSPNVAYTVAFTYEKGKARKRTNALEGITIMEREAFEQSPVLFLKNKGYEQAEIEMKLPKYALFELENGRKRMVASKEAQKANSFLLPEHLVTLLYHAKQYDEISHKESFDYVNEHHKEFSEVFARVLEFAGKYTLAEKNIEKLEKIYKENQTDDLAKLASSFVNLMQFNAMGAPADFKFFDVTIPRKRYTSLTEIWQSTIIHQSITGLYETRIRMGK

SEQ ID NO: 212 - protein, 1329 aa, Enterococcus faecium
MKKEYTIGLDIGTNSVGWSVLTDDYRLVSKKMKVAGNTEKSSTKKNFWGVRLFDEGQTAEARRSKRTARRRLARRRQRILELQKIFAPEILKIDEHFFARLNESFLVLDEKKQSRHPVFATIKQEKSYHQTYPTIYHLRQALADSSEKADIRLVYLAMAHLLKYRGHFLIEGELNTENSSVTETFRQFLSTYNQQFSEADKLDEAVDCSFVFTEKMSKTKKAETLLKYFPHEKSNGYLSQFIKLMVGNQGNFKNVFGLEEEAKLQFSKETYEEDLEELLEKIGDDYIDLFVQAKNVYDAVLLSEILSDSTKNTRAKLSAGMIRRYDAHKEDLVLLKRFVKENLPKKYRAFFGDNSVNGYAGYIEGHATQEDFYKFVKKELTGIRGSEVFLTKIEQENFLRKQRTFDNGVIPHQIHLTELRAIIANQKKHYPFLKEEQEKLESLLTFKIPYYVGPLAKKQENSPFAWLIRKSEEKIKPWNLPEIVDMEGSAVRFIERMNNTDMYIPHNKVLPKNSLLYQKFSIYNELTKVRYQDERGQMNYFSSIEKKEIFHELFEKNRKVTKKDLQEFLYLKYDIKHAELSGIEKAFNASYTTYHDFLTMSENKQWLEDPELASMFEEIIKTLTVFEDREMIKTRLSHHEATLGKHIIKKLTKKHYTGWGRLSKELIQGIRDKQSNKTILDYLIDDDFPHHRNRNFMQLINDDSLSFKKEIKKAQMITDTENLEEIVKELTGSPAIKKGILQSLKIVDEIVGIMGYEPANIVVEMARENQTTGRGLKSSRPRLKALEESLKDFGSQLLKEYPTDNSSLQKDRLYLYYLQNGRDMYTGAPLDIHRLSDYDIDHIIPRSFTTDNSIDNKVLVSSKENRLKKDDVPSEKVVKKMRSFWYDLYSSKLISKRKLDNLTKIKLTEEDKAGFIKRQLVETRQITKHVAGILHHRFNKAEDTNEPIRKVRIITLKSALVSQFRNRFGIYKVREINEYHHAHDAYLNGVVALALLKKYPQLAPEFVYGEYLKFNAHKANKATVKKEFYSNIMKFFESDTPVCDENGEIFWDKSKSIAQVKKVINHHHMNIVKKTEIQKGGFSKETVEPKKDSSKLLPRKNNWDPAKYGGLGSPNVAYTVAFTYEKGKARKRTNALEGITIMEREAFEQSPVLFLKNKGYEQAEIEMKLPKYALFELENGRKRMVASKEAQKANSFLLPEHLVTLLYHAKQYDEISHKESFDYVNEHHKEFSEVFARVLEFAGKYTLAEKNIEKLEKIYKENQTDDLAKLASSFVNLMQFNAMGAPADFKFFDVTIPRKRYTSLTEIWQSTIIHQSITGLYETRIRMGK

SEQ ID NO: 213 - protein, 1329 aa, Enterococcus faecium
MKKEYTIGLDIGTNSVGWSVLTDDYRLVSKKMKVAGNTEKSSTKKNFWGVRLFDEGQTAEARRSKRTARRRLARRRQRILELQKIFAPEILKIDEHFFARLNESFLVLDEKKQSRHPVFATIKQEKSYHQTYPTIYHLRQALADSSEKADIRLVYLAMAHLLKYRGHFLIEGELNTENSSVTETFRQFLSTYNQQFSEADKLDEAVDCSFVFTEKMSKTKKAETLLKYFPHEKSNGYLSQFIKLMVGNQGNFKNVFGLEEEAKLQFSKETYEEDLEELLEKIGDDYIDLFVQAKNVYDAVLLSEILSDSTKNTRAKLSAGMIRRYDAHKEDLVLLKRFVKENLPKKYRAFFGDNSVNGYAGYIEGHATQEDFYKFVKKELTGIRGSEVFLTKIEQENFLRKQRTFDNGVIPHQIHLTELRAIIANQKKHYPFLKEEQEKLESLLTFKIPYYVGPLAKKQENSPFAWLIRKSEEKIKPWNLPEIVDMEGSAVRFIERMINTDMYIPHNKVLPKNSLLYQKFSIYNELTKVRYQDERGQMNYFSSIEKKEIFHELFEKNRKVTKKDLQEFLYLKYDIKHAELSGIEKAFNASYTTYHDFLTMSENKQWLEDPELASMFEEIIKTLTVFEDREMIKTRLSHHEATLGKHIIKKLTKKHYTGWGRLSKELIQGIRDKQSNKTILDYLIDDDFPHHRNRNFMQLINDDSLSFKKEIKKAQMITDTENLEEIVKELTGSPAIKKGILQSLKIVDEIVGIMGYEPANIVVEMARENQTTGRGLKSSRPRLKALEESLKDFGSQLLKEYPTDNSSLQKDRLYLYYLQNGRDMYTGAPLDIHRLSDYDIDHIIPRSFTTDNSIDNKVLVSSKENRLKKDDVPSEKVVKKMRSFWYDLYSSKLISKRKLDNLTKIKLTEEDKAGFIKRQLVETRQITKHVAGILHHRFNKAEDTNEPIRKVRIITLKSALVSQFRNRFGIYKVREINEYHHAHDAYLNGVVALALLKKYPQLAPEFVYGEYLKFNAHKANKATVKKEFYSNIMKFFESDTPVCDENGEIFWDKSKSIAQVKKVINHHHMNIVKKTEIQKGGFSKETVEPKKDSSKLLPRKNNWDPAKYGGLGSPNVAYTVAFTYEKGKARKRTNALEGITIMEREAFEQSPVLFLKNKGYEQAEIEMKLPKYALFELENGRKRMVASKEAQKANSFLLPEHLVTLLYHAKQYDEISHKESFDYVNEHHKEFSEVFARVLEFAGKYTLAEKNIEKLEKIYKENQTDDLAKLASSFVNLMQFNAMGAPADFKFFDVTIPRKRYTSLTEIWQSTIIHQSITGLYETRIRMGK

SEQ ID NO: 214 - protein, 1328 aa, Enterococcus faecium
MKKEYTIGLDIGTNSVGWSVLTDDYRLVSKKMKVAGNTEKSSTKKNFWGVRLFDEGQTAEARRSKRTARRRLARRRQRILELQKIFAPEILKIDEHFFARLNESFLVLDEKKQSRHPVFATIKQEKSYHQTYPTIYHLRQALADSSEKADIRLVYLAMAHLLKYRGHFLIEGELNTENSSVTETFRQFLSTYNQQFSEADKLDEAVDCSFVFTEKMSKTKKAETLLKYFPHEKSNGYLSQFIKLMVGNQGNFKNVFGLEEAKLQFSKETYEEDLEELLEKIGDDYIDLFVQAKNVYDAVLLSEILSDSTKNTRAKLSAGMIRRYDAHKEDLVLLKRFVKENLPKKYRAFFGDNSVNGYAGYIEGHATQEDFYKFVKKELTGIRGSEVFLTKIEQENFLRKQRTFDNGVIPHQIHLTELRAIIANQKKHYPFLKEEQEKLESLLTFKIPYYVGPLAKKQENSPFAWLIRKSEEKIKPWNLPEIVDMEGSAVRFIERMINTDMYIPHNKVLPKNSLLYQKFSIYNELTKVRYQDERGQMNYFSSIEKKEIFHELFEKNRKVTKKDLQEFLYLKYDIKHAELSGIEKAFNASYTTYHDFLTMSENKQWLEDPELASMFEEIIKTLTVFEDREMIKTRLSHHEATLGKHIIKKLTKKHYTGWGRLSKELIQGIRDKQSNKTILDYLIDDDFPHHRNRNFMQLINDDSLSFKKEIKKAQMITDTENLEEIVKELTGSPAIKKGILQSLKIVDEIVGIMGYEPANIVVEMARENQTTGRGLKSSRPRLKALEESLKDFGSQLLKEYPTDNSSLQKDRLYLYYLQNGRDMYTGAPLDIHRLSDYDIDHIIPRSFTTDNSIDNKVLVSSKENRLKKDDVPSEKVVKKMRSFWYDLYSSKLISKRKLDNLTKIKLTEEDKAGFIKRQLVETRQITKHVAGILHHRFNKAEDTNEPIRKVRIITLKSALVSQFRNRFGIYKVREINEYHHAHDAYLNGVVALALLKKYPQLAPEFVYGEYLKFNAHKANKATVKKEFYSNIMKFFESDTPVCDENGEIFWDKSKSIAQVKKVINHHHMNIVKKTEIQKGGFSEETVEPKKDSSKLLPRKNNWDPAKYGGLGSPNVAYTVAFTYEKGKARKRTNALEGITIMEREAFEQSPVLFLKNKGYEQAEIEMKLPKYALFELENGRKRMVASKEAQKANSFLLPEHLVTLLYHAKQYDEISHKESFDYVNEHHKEFSEVFARVLEFAGKYTLAEKNIEKLEKIYKENQTDDLAKLASSFVNLMQFNAMGAPADFKFFDVTIPRKRYTSLTEIWQSTIIHQSITGLYETRIRMGK

SEQ ID NO: 215 - protein, 1329 aa, Enterococcus faecium
MKKEYTIGLDIGTNSVGWSVLTDDYRLVSKKMKVAGNTEKSSTKKNFWGVRLFDEGQTAEARRSKRTARRRLARRRQRILELQKIFAPEILKIDEHFFARLNESFLVLDEKKQSRHPVFATIKQEKSYHQTYPTIYHLRQALADSSEKADIRLVYLAMAHLLKYRGHFLIEGELNTENSSVTETFRQFLSTYNQQFSEADKLDEAVDCSFVFTEKMSKTKKAETLLKYFPHEKSNGYLSQFIKLMVGNQGNFKNVFGLEEEAKLQFSKETYEEDLEELLEKIGDDYIDLFVQAKNVYDAVLLSEILSDSTKNTRAKLSAGMIRRYDAHKEDLVLLKRFVKENLPKKYRAFFGDNSVNGYAGYIEGHATQEDFYKFVKKELTGIRGSEVFLTKIEQENFLRKQRTFDNGVIPHQIHLTELRAIIANQKKHYPFLKEEQEKLESLLTFKIPYYVGPLAKKQENSPFAWLIRKSEEKIKPWNLPEIVDMEGSAVRFIERMINTDMYMPHNKVLPKNSLLYQKFSIYNELTKVRYQDERGQMNYFSSIEKKEIFHELFEKNRKVTKKDLQEFLYLKYDIKHAELSGIEKAFNASYTTYHDFLTMSENKQWLEDPELASMFEEIIKTLTVFEDREMIKTRLSHHEATLGKHIIKKLTKKHYTGWGRLSKELIQGIRDKQSNKTILDYLIDDDFPHHRNRNFMQLINDDSLSFKKEIKKAQMITDTENLEEIVKELTGSPAIKKGILQSLKIVDEIVGIMGYEPANIVVEMARENQTTGRGLKSSRPRLKALEESLKDFGSQLLKEYPTDNSSLQKDRLYLYYLQNGRDMYTGAPLDIHRLSDYDIDHIIPRSFTTDNSIDNKVLVSSKENRLKKDDVPSEKVVKKMRSFWYDLYSSKLISKRKLDNLTKIKLTEEDKAGFIKRQLVETRQITKHVAGILHHRFNKAEDTNEPIRKVRIITLKSALVSQFRNRFGIYKVREINEYHHAHDAYLNGVVALALLKKYPQLAPEFVYGEYLKFNAHKANKATVKKEFYSNIMKFFESDTPVCDENGEIFWDKSKSIAQVKKVINHHHMNIVKKTEIQKGGFSKETVEPKKDSSKLLPRKNNWDPAKYGGLGSPNVAYTVAFTYEKGKARKRTNALEGITIMEREAFEQSPVLFLKNKGYEQAEIEMKLPKYALFELENGRKRMVASKEAQKANSFLLPEHLVTLLYHAKQYDEISHKESFDYVNEHHKEFSEVFARVLEFAGKYTLAEKNIEKLEKIYKENQTDDLAKLASSFVNLMQFNAMGAPADFKFFDVTIPRKRYTSLTEIWQSTIIHQSITGLYETRIRMGK

SEQ ID NO: 216 - protein, 1329 aa, Enterococcus faecium
MKKEYTIGLDIGTNSVGWSVLTDDYRLVSKKMKVAGNTEKSSTKKNFWGVRLFDEGQTAEARRSKRTARRRLARRRQRILELQKIFAPEILKIDEHFFARLNESFLVLDEKKQSRHPVFATIKQEKSYHQTYPTIYHLRQALADSSEKADIRLVYLAMAHLLKYRGHFLIEGELNTENSSVTETFRQFLSTYNQQFSEADKLDEAVDCSFVFTEKMSKTKKAETLLKYFPHEKSNGYLSQFIKLMVGNQGNFKNVFGLEEEAKLQFSKETYEEDLEELLEKIGDDYIDLFVQAKNVYDAVLLSEILSDSTKNTRAKLSAGMIRRYDAHKEDLVLLKRFVKENLPKKYRAFFGDNSVNGYAGYIEGHATQEDFYKFVKKELTGIRGSEVFLTKIEQENFLRKQRTFDNGVIPHQIHLTELRAIIANQKKHYPFLKEEQEKLESLLTFKIPYYVGPLAKKQENSPFAWLIRKSEEKIKPWNLPEIVDMEGSAVRFIERMINTDMYIPHNKVLPKNSLLYQKFSIYNELTKVRYQDERGQMNYFSSIEKKEIFHELFEKNRKVTKKDLQEFLYLKYDIKHAELSGIEKAFNASYTTYHDFLTMSENKQWLEDPELASMFEEIIKTLTVFEDREMIKTRLSHHEATLGKHIIKKLTKKHYTGWGRLSKELIQGIRDKQSNKTILDYLIDDDFPHHRNRNCMQLINDDSLSFKKEIKKAQMITDTENLEEIVKELTGSPAIKKGILQSLKIVDEIVGIMGYEPANIVVEMARENQTTGRGLKSSRPRLKALEESLKDFGSQLLKEYPTDNSSLQKDRLYLYYLQNGRDMYTGAPLDIHRLSDYDIDHIIPRSFTTDNSIDNKVLVSSKENRLKKDDVPSEKVVKKMRSFWYDLYSSKLISKRKLDNLTKIKLTEEDKAGFIKRQLVETRQITKHVAGILHHRFNKAEDTNEPIRKVRIITLKSALVSQFRNRFGIYKVREINEYHHAHDAYLNGVVALALLKKYPQLAPEFVYGEYLKFNAHKANKATVKKEFYSNIMKFFESDTPVCDENGEIFWDKSKSIAQVKKVINHHHMNIVKKTEIQKGGFSKETVEPKKDSSKLLPRKNNWDPTKYGGLGSPNVAYTVAFTYEKGKARKRTNALEGITIMEREAFEQSPVLFLKNKGYEQAEIEMKLPKYALFELENGRKRMVASKEAQKANSFLLPEHLVTLLYHAKQYDEISHKESFDYVNEHHKEFSEVFARVLEFAGKYTLAEKNIEKLEKIYKENQTDDLAKLASSFVNLMQFNAMGAPADFKFFDVTIPRKRYTSLTEIWQSTIIHQSITGLYETRIRMGK

SEQ ID NO: 217 - protein, 1329 aa, Enterococcus faecium
MTKDYTIGLDIGTNSVGWAVLTDDYQLMKRKMSVHGNTEKKKIKKNFWGARLFDEGQTAEFRRTKRTNRRRLARRKYRLSKLQDLFAEELCKQDDCFFVRLEESFLVPEEKQYKPASIFPTLEEEKEYYQKYPTIYHLRQKLVDSTEKEDLRLVYLALAHLLKYRGHFLFEGDLDTENTSIEESFRVFLEQYSKQSDQPLIVHQPVLTILTDKLSKTKKVEEILKYYPTEKINSFFAQCLKLIVGNQANFKRIFDLEAEVKLQFSKETYEEDLESLLEKIGDEYLDIFLQAKKVHDAILLSEIISSTVKHTKAKLSSGMVERYERHKADLAKFKQFVKENVPQKATVFFKDTTKNGYAGYIKGKTTQEEFYKFVKKELSGVVGSEPFLEKIDQETFLLKQRTYTNGVIPHQVHLIELKAIIDQQKQHYPFLEEAGPKIIALFKFRIPYYVGPLAKEQEASSFAWIERKTAEKINPWNFSEVVDIEKSAMRFIQRMTKQDTYLPTEKVLPKNSLLYQKYMIFNELTKVSYKDERGVKQYFSGDEKQQIFKQLFQKERGKITVKKLQNFLYTHYHIENAQIFGIEKAFNASYSTYHDFMKLAKTNEWLEQPEMEPIFEDIVKILTIFEDRQMIKHQLSKYQEVFGEKLLKEFARKHYTGWGRFSAKLIHGIRDRKTNKTILDYLIDDDVPANRNRNLMQLINDEHLSFKEEIAKATVFSKHKSLVDVIQDLPGSPAIKKGIWQSLKIVEELIAIIGYKPKNIVIEMARENQKTHRTSPRLKALENGLKQIGSTLLKEQPTDNKALQKERLYLYYLQNGRDMYTGEPLEIENLHQYEVDHIIPRSFIVDNSIDDKVLVASKQNQKKRDDVPKKQIVNEQRIFWNQLKEAKLISTKKYAYLTKIELTPEDKARFIQRQLVETRQITKHVANILHQSFNQEEEGTDCDGVQIITLKATLTSQFRQTFGLYKVREINPHHHAHDAYLNGFIANVLLKRYPKLAPEFVYGKYVKYSLARENKATAKKEFYSNILKFLESDEPFCDENGEIYWEKSHHLPRIKKVLSSHQVNVVKKVEQQKGGFYKETVNSKEKPDKLIERKNNWDVTKYGGFGSPVIAYAIAFVYAKGKTQKKTRAIEGITIMEQAAFEKDPTTFLKEKGFPQVTEFIKLPKYTLFEFDNGRRRFLASKESQKGNPFILSDQLVTLLYHAQHYDKITYQESFDYVNTHLSDFSAILTEVLAFAEKYTLADKNIERIQELYEENKYGETSMIAQSFLQLLQFNAIGAPADFKFFGVTIPRKRYTSLTEIWDATIIYQSVTGLYETRIRMGDLWAGEQ

SEQ ID NO: 218 - protein, 1329 aa, Enterococcus faecium
MKKEYTIGLDIGTNSVGWSVLTDDYRLVSKKMKVAGNTEKSSTKKNFWGVRLFDEGQTAEARRSKRTARRRLARRRQRILELQKIFAPEILKIDEHFFARLNESFLVLDEKKQSRHPVFATIKQEKSYHQTYPTIYHLRQALADSSEKADIRLVYLAMAHLLKYRGHFLIEGELNTENSSVTETFRQFLSTYNQQFSEADKLDEAVDCSFVFTEKMSKTKKAETLLKYFPHEKSNGYLSQFIKLMVGNQGNFKNVFGLEEEAKLQFSKETYEEDLEELLEKIGDDYIDLFVQAKNVYDAVLLSEILSDSTKNTRAKLSAGMIRRYDAHKEDLVLLKRFVKENLPKKYRAFFGDNSVNGYAGYIEGHATQEDFYKFVKKELTGIRGSEVFLTKIEQENFLRKQRTFDNGVIPHQIHLTELRAIIANQKKHYPFLKEEQEKLESLLTFKIPYYVGPLAKKQENSPFAWLIRKSEEKIKPWNLPEIVDMEGSAVRFIERMINTDMYMPHNKVLPKNSLLYQKFSIYNELTKVRYQDERGQMNYFSSIEKKEIFHELFEKNRKVTKKDLQEFLYLKYDIKHAELSGIEKAFNASYTTYHDFLTMSENKQWLEDPELASMFEEIIKTLTVFEDREMIKTRLSHHEATLGKHIIKKLTKKHYTGWGRLSKELIQGIRDKQSNKTILDYLIDDDFPHHRNRNFMQLINDDSLSFKKEIKKAQMITDTENLEEIVKELTGSPAIKKGILQSLKIVDEIVGIMGYEPANIVVEMARENQTTGRGLKSSRPRLKALEESLKDFGSQLLKEYPTDNSSLQKDRLYLYYLQNGRDMYTGAPLDIHRLSDYDIDHIIPRSFTTDNSIDNKVLVSSKENRLKKDDVPSEKVVKKMRSFWYDLYSSKLISKRKLDNLTKIKLTEEDKAGFIKRQLVETRQITKHVAGILHHRFNKAEDTNEPIRKVRIITLKSALVSQFRNRFGIYKVREINEYHHAHDAYLNGVIALALLKKYPQLAPEFVYGEYLKFNAHKANKATVKKEFYSNIMKFFESDTPVCDENGEIFWDKSKSIAQVKKVINHHHMNIVKKTEIQKGGFSKETVEPKKDSSKLLPRKNNWDPAKYGGLGSPNVAYTVAFTYEKGKARKRTNALEGITIMEREAFEQSPVLFLKNKGYEQAEIEMKLPKYALFELENGRKRMVASKEAQKANSFLLPEHLVTLLYHAKQYDEISHKESFDYVNEHHKEFSEVFARVLEFAGKYTLAEKNIEKLEKIYKENQTDDLAKLASSFVNLMQFNAMGAPADFKFFDVTIPRKRYTSLTEIWQSTIIHQSITGLYETRIRMGK

SEQ ID NO: 219 - protein, 1329 aa, Enterococcus hirae
MTKDYTIGLDIGTNSVGWAVLTDDYQLMKRKMSVHGNTEKKKIKKNFWGARLFDEGQTAEFRRTKRTNRRRLARRKYRLSKLQDLFAEELCKQDDCFFVRLEESFLVPEEKQYKPASIFPTLEEEKEYYQKYPTIYHLRQKLVDSTEKGDLRLVYLALAHLLKYRGHFLFEGDLDTENTSIEESFRVFLEQYGKQSDQPLIVHQPVLTILTDKLSKTKKVEEILKYYPTEKINSFFAQCLKLIVGNQANFKRIFDLEAEVKLQFSKETYEEDLESLLEKIGDEYLDIFLQAKKVHDAILLSEIISSTVKHTQAKLSSGMVERYERHKADLAKFKQFVKENVPQKATVFFKDTTKNGYAGYIKGKTTQEEFYKFVKKELSGVVGSEPFLEKIDQETFLLKQRTYTNGVIPHQVHLIELKAIIDQQKQHYPFLEEAGPKIIALFKFRIPYYVGPLAKEQEASSFAWIERKTAEKINPWNFSEVVDIEKSAMRFIQRMTKQDTYLPTEKVLPKNSLFYQKYMIFNELTKVSYKDERGVKQYFSGDEKQQIFKQLFQKERGKITVKKLQNFLYTHYHIENAQIFGIEKAFNASYSTYHDFMKLAKTNEWLEQPEMEPIFEDIVKILTIFEDRQMIKHQLSKYQEVFGEKLLKEFARKHYTGWGRFSAKLIHGIRDRKTNKTILDYLIDDDVPANRNRNLMQLINDEHLSFKEEIAKATVFSKHKSLVDVIQDLPGSPAIKKGIWQSLKIVEELIAIIGYKPKNIVIEMARENQKTHRTKPRLKALENGLKQIGSTLLKEQPTDNKALQKERLYLYYLQNGRDMYTGEPLEIENLHQYEVDHIIPRSFIVDNSIDNKVLVASKQNQKKRDDVPKKQIVNEQRIFWNQLKEAKLISPKKYAYLTKIELTPEDKARFIQRQLVETRQITKHVANILHQSFNQEEEGTDCDGVQIITLKATLTSQFRQTFGLYKVREINPHHHAHDAYLNGFIANVLLKRYPKLAPEFVYGKYVKYSLARENKATAKKEFYSNILKFLESDEPFCDENGEIYWEKSHHLPRIKKVLSSHQVNVVKKVEQQKGGFYKETVNSKEKPDKLIERKNNWDVTKYGGFGSPVIAYAIAFVYAKGKTQKKTKAIEGITIMEQAAFEKDPTTFLKDKGFPQVTEFIKLPKYTLFEFDNGRRRFLASKESQKGNPFILSDQLVTLLYHAQHYDKITYQESFDYVNTHLSDFSAILTEVLAFAEKYTLADKNIERIQELYEENKYGEISMIAQSFLQLLQFNAIGAPADFKFFGVTIPRKRYTSLTEIWDATIIYQSVTGLYETRIRMGDLWAGEQ

SEQ ID NO: 220 - protein, 1329 aa, Enterococcus hirae
MTKDYTIGLDIGTNSVGWAVLTDDYQLMKRKMSVHGNTEKKKIKKNFWGARLFDEGQTAEFRRTKRTNRRRLARRKYRLSKLQDLFAEELCKQDDCFFVRLEESFLVPEEKQYKPASIFPTLEEEKEYYQKYPTIYHLRQKLVDSTEKEDLRLVYLALAHLLKYRGHFLFEGDLDTENTSIEESFRVFLEQYSKQSDQPLIVHQPVLTILTDKLSKTKKVEEILKYYPTEKINSFFAQCLKLIVGNQANFKRIFDLEAEVKLQFSKETYEEDLESLLEKIGDEYLDIFLQAKKVHDAILLSEIISSTVKHTKAKLSSGMVERYERHKADLAKFKQFVKENVPQKATVFFKDTTKNGYAGYIKGKTTQEEFYKFVKKELSGVVGSEPFLEKIDQETFLLKQRTYTNGVIPHQVHLIELKAIIDQQKQHYPFLEEAGPKIIALFKFRIPYYVGPLAKEQEASSFAWIERKTAEKINPWNFSEVVDIEKSAMRFIQRMTKQDTYLPTEKVLPKNSLLYQKYMIFNELTKVSYKDERGVKQYFSGDEKQQIFKQLFQKERGKITVKKLQNFLYTHYHIENAQIFGIEKAFNASYSTYHDFMKLAKTNEWLEQPEMEPIFEDIVKILTIFEDRQMIKHQLSKYQEVFGEKLLKEFARKHYTGWGRFSAKLIHGIRDRKTNKTILDYLIDDDVPANRNRNLMQLINDEHLSFKEEIAKATVFSKHKSLVDVIQDLPGSPAIKKGIWQSLKIVEELIAIIGYKPKNIVIEMARENQKTHRTSPRLKALENGLKQIGSTLLKEQPTDNKALQKERLYLYYLQNGRDMYTGEPLEIENLHQYEVDHIIPRSFIVDNSIDNKVLVASKQNQKKRDDVPKKQIVNEQRIFWNQLKEAKLISPKKYAYLTKIELTPEDKARFIQRQLVETRQITKHVANILHQSFNQEEEGTDCDGVQIITLKATLTSQFRQTFGLYKVREINPHHHAHDAYLNGFIANVLLKRYPKLAPEFVYGKYVKYSLARENKATAKKEFYSNILKFLESDEPFCDENGEIYWEKSHHLPRIKKVLSSHQVNVVKKVEQQKGGFYKETVNSKEKPDKLIERKNNWDVTKYGGFGSPVIAYAIAFVYAKGKTQKKTRAIEGITIMEQAAFEKDPTTFLKEKGFPQVTEFIKLPKYTLFEFDNGRRRFLASKESQKGNPFILSDQLVTLLYHAQHYDKITYQESFDYVNTHLSDFSAILTEVLAFAEKYTLADKNIERIQELYEENKYGETSMIAQSFLQLLQFNAIGAPADFKFFGVTIPRKRYTSLTEIWDATIIYQSVTGLYETRIRMGDLWAGEQ

SEQ ID NO: 221 - protein, 1329 aa, Enterococcus hirae
MTKDYTIGLDIGTNSVGWAVLTDDYQLMKRKMSVHGNTEKKKIKKNFWGARLFDEGQTAEFRRTKRTNRRRLARRKYRLSKLQDLFAEELCKQDDCFFVRLEESFLVPEEKQYKPASIFPTLEEEKEYYQKYPTIYHLRQKLVDSTEKEDLRLVYLALAHLLKYRGHFLFEGDLDTENTSIEESFRVFLEQYGKQSDQPLIVHQPVLTILTDKLSKTKKVEEILKYYPTEKINSFFAQCLKLIVGNQANFKRIFDLEAEVKLQFSKETYEEDLESLLEKIGDEYLDIFLQAKKVHDAILLSEIISSTVKHTQAKLSSGMVERYERHKADLAKFKQFVKENVPQKATVFFKDTTKNGYAGYIKGKTTQEEFYKFVKKELSGVVGSEPFLEKIDQETFLLKQRTYTNGVIPHQVHLIELKAIIDQQKQHYPFLEEAGPKIIALFKFRIPYYVGPLAKEQEASSFAWIERKTAEKINPWNFSEVVDIEKSAMRFIQRMTKQDTYLPTEKVLPKNSLLYQKYMIFNELTKVSYKDERGVKQYFSGDEKQQIFKQLFQKERGKITVKKLQNFLYTHYHIENAQIFGIEKAFNASYSTYHDFMKLAKTNEWLEQPEMEPIFEDIVKILTIFEDRQMIKHQLSKYQEVFGEKLLKEFARKHYTGWGRFSAKLIHGIRDRKTNKTILDYLIDDDVPANRNRNLMQLINDEHLSFKEEIAKATVFSKHKSLVDVIQDLPGSPAIKKGIWQSLKIVEELIAIIGYKPKNIVIEMARENQKTHRTKPRLKALENGLKQIGSTLLKEQPTDNKALQKERLYLYYLQNGRDMYTGEPLEIENLHQYEVDHIIPRSFIVDNSIDNKVLVASKQNQKKRDDVPNKQIVNEQRIFWNQLKEAKLISPKKYAYLTKIELTPEDKARFIQRQLVETRQITKHVANILHQSFNQEEEGTDCDGVQIITLKATLTSQFRQTFGLYKVREINPHHHAHDAYLNGFIANVLLKRYPKLAPEFVYGKYVKYSLARENKATAKKEFYSNILKFLESDEPFCDENGEIYWEKSHHLPRIKKVLSSHQVNVVKKVEQQKGGFYKETVNSKEKPDKLIERKNNWDVTKYGGFGSPVIAYAIAFVYAKGKTQKKTRAIEGITIMEQAAFEKDPTTFLKDKGFPHVTEFIKLPKYTLFEFDNGRRRFLASKESQKGNPFILSDQLVTLLYHAQHYDKITYQESFDYVNTHLSDFSAILTEVLAFAEKYTLADKNIERIQELYEENKYGEISMIAQSFLQLLQFNAIGAPADFKFFGVTIPRKRYTSLTEIWDATIIYQSVTGLYETRIRMGDLWAGEQ

SEQ ID NO: 222 - protein, 1324 aa, Enterococcus italicus
MKNDYTIGLDIGTNSVGYSVVTDDYKVISKKMNVFGNTEKKSIKKNFWGVRLFESGQTAQEARMKRTSRRRIARRKNRICYLQEIFQPEMNHLDNNFFYRLNESFLVADDAKYDKHPIFGTLDEEIHFHEQFPTIYHLRKYLADGDEKADLRLVYLAIAHIIKFRGNFLIEGELNTENNSVIELSKVFVQLYNQTLSELEFIDESIDFSEVLTQQLSKSERADNVLKLFPDEKGTGIFAQFIKLIVGNQGNFKKVFQLEEDQKLQLSTDDYEENIENLLAIIGDEYGDIFVAAQNLYQAILLAGILTSTEKTRAKLSASMIQRYEEHAKDLKLLKRFVKEHIPDKYAEIFNDATKNGYAGYIDGKTKEEEFYKYLKTTLVQKSGYQYFIEKIEQENFLRKQRIYDNGVIPHQVHAEELRAILRKQEKYYSFLKENHEKIEQIFKVRIPYYVGPLAKHNEQSRFAWNIRKSDEPIRPWNMNDVVDENASAVAFIERMTIKDIYLNENVLPRHSLIYEKFTVFNELTKVLYADDRGVFQRFSAEEKEDIFEKLFKSERKVTKKKLENYLRIELSISSPSVKGIEEQFNANFGTYLDLKKFDELHPYLDDEKYQDTLEEVIKVLTVFEDRSMIQNQLEQLPLNLSTKTIKALSRRKYTGWGRLSARLIDGIHDKNSGKTILDYLIDESDSYIVNRNFMQLINDDHLSFKKIIEDSQPYKEQQSAEEIVSELSGSPAIKKGILQSLKIVDELVAIMGYKPKNIVVEMARENQTTGRGKQNSKPRLKGIENGLKEFSDSVLKGSSIDNKQLQNDRLYLYYLQNGKDMYTGHELDIDHLSTYDIDHIIPQSFLTDNSIDNRVLTTSKSNRGKSDNVPSEEVVRKMDRFWRKLLNAKLISERKYTNLTKKELTESDKAGFLKRQLVETRQITKHVATILDSKFNEDSNNRDVQIITLKSALVSEFRKTFNLYKVREINDLHHAHDAYLNAVVALSLLRVYPQLKPEFVYGEYGKNSIHDQNKATIKKQFYSNITRYFASKDIINDDGEILWNKQETIAQVIKTLGMHQVNVVKKVEIQKGGFSKESIQPKGESQKLIRRKQQWNTKKYGGFDSPVVAYAILLSFDKGKRKARSFKIVGITIQDRESFEGNPILYLSKKDYHNPKVEAILPKYSLFEFENGRRRMVASSETQKGNQLIIPGHLMELLYHSKKIINGKNSDSVSYIQNNKEKFREIFEYIVDFSSKYISADANLNKIEKIFENNFHKASEQEIAKSFINLLTFTAMGAPADFEFFGEKIPRKRYVSISEIIDAVFIHQSITGLYETRVRLTEV

SEQ ID NO: 223 - protein, 1323 aa, Enterococcus mundtii
MEKEYTIGLDIGTNSVGWAVLTDDYRLVARKMSIQGDSNRKKIKKNFWGARLFEEGKTAQFRRIKRTNRRRIARRRQRVLALQDIFAEEIHKKDPNFFARLEEGDRVEADKRFAKFPVFATLSEEKNYHRQYPTIYHLRHDLANSKEQADIRLVYLAIAHCLKYRGHFLFEGELDTENTSVTENYQQFLQAYQQFFPEPIGDLDDAVPILTERLSKAKRVEKVLAYYPSEKSTGNFAQFLKLMVGNQANFKKTFDLEEEMKLNFTRDCYEEDLNELLEKTSDDYAELFLKAKGVYDAILLSQILSKSDDETKAKLSANMKLRFEEHQRDLKQLKELVRRDLPKKYDDFFKNRSKNGYAGYVKGKATQEDFYKFLRTELAGLEESQSIMEKIDLEIYLLKQRTFANGVIPHQIHLVEMREIMDRQKRFYPFLKGAQGKIEKLLTFRIPYYVGPLAQEGQSPFAWIKRKSPSQITPWNFAEVVDKENSAIEFIERMTNQDTYLPKEKVLPKQSLIYQRFMIFNELTKVSYTDERGKSHYFSSEQKRKIFNELFKQHPRVTEKQLRKFLELNEQIDSTEIKGIETSFNASYSTYHDLLKLSTLLDDPDMTTMFEEIIKILTIFEDREMIREQLKPYETVLGLPAIKKLAKKHYTGWGRLSEKMIQGMREKQSRKTILDYLIDDDFPCNRNRNFMQLINDDHLSFKETIANELIMSDSNVLLDQVKAIPGSPAVKKGIWQSIKIVEEIIGIIGKAPKNIVIEMARENQRTSRSRPRLKALEEALKNIDSPLLKDYPTDNQALQKDRLYLYYLQNGKDMYTGEPLEIHRLSEYDIDHIIPRSFIVDNSLDNKVLVSSKVNRGKLDNAPDPLVVKRMRSHWEKLHQAKLISDKKLANLTKQNLTEADKARFIQRQLVETRQITKHVANLLHQHFNLPEEVSATEKTSIITLKSTLTSQFRQMFDIYKVREINHHHHAHDAYLNGVVAMTLLKKYPKLAPEFVYGSYIKGDINQINKATAKKEFYSNIMKFFESEEIICDEQGEVIWNKKRDLSTIKKTIGAHQVNIVKKVEKQKGGFYKETINSKANPEKLIPRKASLDPLKYGGYGSPLVAYTVIFIFEKGKQKKVTKGIEGITVMEQLRFEQDPREFLKTKGYEGVKQWLILPKYILFEAQGGYRRMIASQETQKANSLILPENLVTLLYHARHYDEINHKVSFDYVNAHKEGFNDIFDFISDFGVRYILAPQHLEKIKVAYEKNKEVDLKEMIDAILSLLKFTLFGASVEFKFFDIKILKRYKSLTDIWEATIIYQSVTGLYERRVEVRKLWDGER

SEQ ID NO: 224 - protein, 1330 aa, Enterococcus phoeniculicola
MKKEYTIGLDIGTNSVGWAVLTENYDLVKKKMKVYGNTETKYLKKNLWGVRLFDEGETAADRRLKRTTRRRYSRRRNRICRLQDLFTEEMNQVDANFFHRLQESFLVPDEKEFERHAIFGKMEEEVSYYREFPTIYHLRKHLADTSEQADLRLVYLALAHIVKYRGHFLIEGELNTENSSVSETFRTFIQVYNQIFRENEPLAVPDNIEELFSEKVSRARKVEAILSVYSEEKSTGTLAQFLKLMVGNQGRFKKTFDLEEDGIIQIPKEEYEEELETLLAIIGDEYAEIFSATKSVYDAVALSGILSVTDGDTKAKLSASMVERYEAHQKDLVQFKQFIRKELPEMYAPIFRDNSVSGYAGYVENSVTQAEFYKYIKKAIEKVPGAEYFLEKIEQETFLDKQRTFNNGVIPHQIHLEELEAIIQKQATYYPFLADNKEEMKQLVTFRIPYYVGPLADGNSPFAWLERISSEPIRPGNLAEVVDIKKSATKFIERMTNFDTYLPTEKVLPKHSMIYEKYMVYNELTKVSYVDERGMNQRFSGEEKKQIVEELFKQSRKVTKKLLEKFLSNEFGLVDVAIKGIETSFNAGYGTYHDFLKIGITREQLDKEENSETLEEIVKILTVFEDRKMIREQLKKYTYLFDEEVLKKLERRHYTGWGRLSAKLLIGIKEKRTHKTILDYLIDDGGKQPINRNLMQLINDSDLSFKSEIAEAQSDMNTEDLHEVVQNLAGSPAIKKGILQSLKIVDELVDIMGSLPKNIVVEMARENQTTSRGRTNSNPRMKALEEAMRNLRSNLLKEYPTDNQALQNDRLYLYYLQNGKDMYTGLDLSLHNLSSYDIDHIVPQSFTTDNSLDNRVLVSSKENRGKKDDVPSKEVVQKNITLWETLKNSNLISQKKYDNLTKGLRGGLTEDDRAHFIKRQLVETRQITKHVARILDQRFNSQKDEEGKTIRAVRVVTLKSSLTSQFRKQFAIHKVREINDYHHGHDAYLNGVVANSLLRVYPQLQPEFVYGDYPKFNAYKANKATAKKQLYTNIMKFFAEDAVIIDENGEILWDKKNIATVKKVMSYPQMNIVKKPEIQTGSFSKETIKPKGDSDKLISRKTNWSPKLYGGFDSPQVAYSVIITYEKGKKKVRAKAIVGITIMEQSLFKKDPVSLLEEKGYANPEVLIHLPKYTLYELENGRRRLLASANEAQKGNQLVLPASLVTLLYHAKQVDEDSGKSEEYVREHRAEFAEILNYVQAFSETKILANKNLQTILKLYEENKEADIKEIAESFVNLMKFSAYGAPMDFKFFGKTIPRSRYTSVGELLSATIINQSITGLYETRRKLVD

SEQ ID NO: 225 - protein, 1327 aa, Enterococcus sp.
  source 1..1327: note = AM1
MGKEYTIGLDIGTNSVGWAVLQEDLDLVRRKMKVYGNTEKNYLKKNFWGVDLFDEGMTAKDTRLKRTTRRRYFRRRQRISYLQTFFQEEMNRIDPNFFNRLDESFLIEEDKLSERHPIFGTIEEEVAYHKNYATIYHLRKELADAEEKADLRLVYLALAHIIKYRGHFLIEGRLSTENTSTEETFKTFLQKYNQTFNPVDETISIGSIFADKVSRAKKAEGVLALFPDEKRNGTFDQFLKMIVGNQGNFKKTFELEEDAKLQFSKEEYDESLEALLGEIGDEYADVFEAAKNVYNAVELSGILTVTDNSTKAKLSASMIKRYEDHKTDLKLFKEFIRKNLPEKYHEIFNDKNTDGYAGYIDNSTSQEKFYKYITNLIEKIDGAEYFLKKIENEDFLRKQRTFDNGIIPHQIHLEELKAILHHQAMYYPFLQEKFSNFVDLLTFRIPYYVGPLANGNSRFSWLSRKSDEPIRPWNLAEVVDLSKSAELFIERMTNFDLYLPSEKVLPKHSMLYEKYTVYNELTKVTYKDEQGKVQNFSSEEKERIFIDLFKQHRKVTKKDLSNFLRNEYNLDDVIIDGIENKFNASFNTYHDFLKLKIDPKVLDDPANEPMFEEIVKILTIFEDRKMLREQLSKFSDRLSEKTIKDLERRHYTGWGRLSAKLINGIHDKQSNKTILDYLIDDAPKKNINRNFMQLINDNRLTFKEEIEKEQLKANSEESLIEIVQNLAGSPAIKKGIFQSLKIVDELVEIMGYAPTNIVVEMARENQTTANGRRNSRPRLKNLEKAIDDLDSEILKKHPVDNKALQKDRLYLYYLQNGKDMYTNEELDIHKLSTYDIDHIIPQSFIVDNSLDNRVLVSSSKNRGKLDDVPSKEVVKKMRAFWESLYRSGLISKKKFDNLVKAESGGLSEDDKAGFIHRQLVETRQITKNVARILHQRFNSEKDEEGNLIRKVRIITLKSALTSQFRKNYGIYKIREINDYHHAHDAYLNGVVATALLKIYPQLEPEFVYGEFHRFNAFKENKATAKKQFYSNLMEFSKSDKVIIDENGEILWNQKKIVTVKKVMNYRQMNIVKKVEIQKGGFSKESILPKGDSDKLISRKKEWDTTKYGGFDSPNVAYSVVIRYEKGKTRKLVKTIVGITIMERAAFEKNEREFLKNKGYQNPQICMKLPKYSLYEFDDGRRRLLASAKEAQKGNQMVLPAHLVTFLYHAKHCNEKPDSLKYVTEHQSGFSEIMAHVKDFAEKYTLVDKNLEKILSLYAKNMDSEVKEIAQSFVDLMQLNAFGAPADFKFFGETIPRKRYTSVNELLEATIINQSITGLYETRRRLGD

SEQ ID NO: 226 - protein, 1332 aa, Enterococcus villorum
MNKAYTLGLDIGTNSVGWAVVTDDYRLMAKKMPVHSKMEKKKIKKNFWGARLFDEGQTAEERRNKRATRRRLRRRKYRILELQKIFSEEILKKDSHFFARLDESFLIPEDKQYARFPIFPTLLEEKAYYQNYPTIYHLRQKLADSTEKADIRLVYLALAHMIKYRGHFLFEGELDTENTSVEETFKEFIDIYNEQFEEGIIFYKDIPLILTDKLSKSKKVEKILQYYPKEKTTGCLAQFLKLIVGNQGNFKQAFHLDEEVKIQISKETYEEDLEKLLRKSNEEMIDVFLQVKKVYDAILLSDILSTKMKDTKAKLSAGMIERYQNHKKDLEELKQFVRAHLHEKVTVFFKDSSKDGYAGYIDGKTTQADFYKFLKKELTGVPGSEPMLAKIDQENFLLKQRTPTNGVIPHQVHLTEFKAIIDQQKQYYPFLEKSKEKMIQLLTFRIPYYVGPLAQDKETSSFAWLERKTTEKIKPWNAKDVIDYGASATKFIQRMINYDTYLPTEKVLPKYSMLYQKYTIFNELTKVAYKDDRGIKHQFSSEEKLRIFQELFKKQRRVTKKKLQHFLSANYNIEDAEILGVDKVFNSSYATYHDFLELAKPYELLEQPEMEEMFEDIVKIITIFEDREMVRTQLKKYQRILGEEIFKKLVKKKYTGWGRLSKRLINGIRDQKTNKTILDYLIDDDFPYNRNRNFMQLINDDHLSFKEEIAKELTLSDKQSLLEVVEAIPGSPAIKKGIWQTLKIVEELIAIIGYKPKNIVIEMARENQTTTGGKNRSKPRLKSLEEALKNFDSQLLKERPVDNQSLQKDRLYLYYLQNGKDMYTGESLDIDRLSEYDIDHIIPRSFIVDHSLDNKVLVSSKENRLKKDDVPDSKVVKRMKAYWEKLLRANLISERKFSYLTKLELTDDDKARFIQRQLVETRQITKHVAAILHQYFNQTQELEKEKDIRIITLKSSLVSQFRQVFGIHKVREINHHHHAHDAYLNAVVALALLKKYPRLAPEFVYGSFAKFHLVKENKATAKKEFYSNILKFFEKEEQFCDENGEIFWDKRKHIQQIKKVISSHQVNIVKKVEVQTGSFYKETVNTKEKPDKLIKRKNNWDVTKYGGFGSPVVAYAVVFTYEKGKNHKKAKAIEGITIMEQALFEKDPISFLIEKGYSNVNQFIKLPKYTLFELANGQRRMLASQELQKANSFILPEKLVTLLYHANHYDEIAYKDSYDYVNEHFSNFQDILDKVIIFAEKYTSAPQKLNQIIATYEKNQEADRKIMAHSFVNLMQFNALGAPADFKFFDTTITRKRYTSLTEIWQSTIIYQSVTGLYETRRRMADLWDGVQ

SEQ ID NO: 227 - protein, 1359 aa, synthetic construct
  REGION 1..1359: note = Synthetic polypeptide
ADKKYSIGLDIGTNSVGWAVITDEYKVPSKKFKVLGNTDRHSIKKNLIGALLFDSGETAEATRLKRTARRRYTRRKNRICYLQEIFSNEMAKVDDSFFHRLEESFLVEEDKKHERHPIFGNIVDEVAYHEKYPTIYHLRKKLVDSTDKADLRLIYLALAHMIKFRGHFLIEGDLNPDNSDVDKLFIQLVQTYNQLFEENINASGVDAKAILSARLSKSRRLENLIAQLPGEKKNGLFGNLIALSLGLTPNFKSNFDLAEDAKLQLSKDTYDDDLDNLLAQIGDQYADLFLAAKNLSDAILLSDILRVNTEITKAPLSASMIKRYDEHHQDLTLLKALVRQQLPEKYKEIFFDQSKNGYAGYIDGGASQEEFYKFIKPILEKMDGTEELLVKLNREDLLRKQRTFDNGSIPHQIHLGELHAILRRQEDFYPFLKDNREKIEKILTFRIPYYVGPLARGNSRFAWMTRKSEETITPWNFEEVVDKGASAQSFIERMTNFDKNLPNEKVLPKHSLLYEYFTVYNELTKVKYVTEGMRKPAFLSGEQKKAIVDLLFKTNRKVTVKQLKEDYFKKIECFDSVEISGVEDRFNASLGTYHDLLKIIKDKDFLDNEENEDILEDIVLTLTLFEDREMIEERLKTYAHLFDDKVMKQLKRRRYTGWGRLSRKLINGIRDKQSGKTILDFLKDGFANRNFMQLIHDDSLTFKEDIQKAQVSGQGDSLHEHIANLAGSPAIKKGILQTVKVVDELVKVMGRHKPENIVIEMARENQTTQKGQKNSRERMKRIEEGIKELGSQILKEHPVENTQLQNEKLYLYYLQNGRDMYVDQELDINRLSDYDVDHIVPQSFLKDDSIDNKVLTRSDKNRGKSDNVPSEEVVKKMKNYWRQLLNAKLITQRKFDNLTKAERGGLSELDKAGFIKRQLVETRQITKHVAQILDSRMNTKYDENDKLIREVKVITLKSKLVSDFRKDFQFYKVREINNYHHAHDAYLNAVVGTALIKKYPKLESEFVYGDYKVYDVSEQEIGKATAKYFFYSNIMNFFKTEITLANGEIRKRPLIETNGETGEIVWDKGRDFATVRKVLSMPQVNIVKKTEVQTGGFSKESILPKRNSDKLIARKKDWDPKKYGGFDSPTVAYSVLVVAKVEKGKSKKLKSVKELLGITIMERSSFEKNPIDFLEAKGYKEVKKDLIIKLPKYSLFELENGRKRMLASGELQKGNELALPSKYVNFLYLASHYEKLKGSPEDNEQKQLFVEQHKHYLDEIIEQISEFSKRVILADANLDKVLSAYNKHRDKPIREQAENIIHLFTLTNLGAPAAFKYFDTTIDRKRYTSTKEVLDATLIHQSITGLYETRIDLSQLGGD

SEQ ID NO: 228 - protein, 1300 aa, Kandleria vitulina
NNKIYNIGLDIGDASVGWAVVDEHYNLLKRHGKHMWGSRLFTQANTAVERRSSRSTRRRYNKRRERIRLLRGIMEDMVLDVDPTFFIRLANVSFLDQEDKKDYLKSNYNLFIDKDFNDKTYYDKYPTIYHLRKHLCESKEKEDPRLIYLALHHIVKYRGNFLYEGQKFSMDVSNIEDKMIDVLRQFNEINLFEYVEDKKIDEVLNVLKEPLSKKHKADKAFALFDTTKDNKAAYKELCAALAGNKFNVTKMLKEAELHDEDEKDISFKFSDATFDDAFVEKQPLLGDCVEFIDLLHDIYSWVELQNILGSAHTSEPSISAAMIQRYEDHKNDLKLLKDVIRKYLPKKYFEVFRDEKSKKNNYCNYINHKTPVDEFYKYIKKLIEKIDDPDVKTILNKIELESFMLKQNSRTNGAVPYQMQLDELNKILENQSVYYSDLKDNEDKIRSILTFRIPYYFGPLITKDRQFDWIIKKEGKENERILPWNANEIVDVDKTADEFIKRMRNFCTYFPDEPVLAKNSLTVSKYEVLNEINKLRINDHLIKRDIKDKMLHTLFMDHKSISANAMKKWLVKNQYFSNTDDIKIEGFQKENACSTSLTPWIDFTKIFGEINNSNYELIEKIIYDVTVFEDKKILRRRLKKEYDLDEEKIKKILKLKYSGWSRLSKKLLSGIKTKRTPETVLEVMETNMNLMQVINDEKLGFKKTIDDANSTSVSGKFSYAEVQELAGSPAIKRGIWQALLIVDEIKKIMKHEPAHVYIEFARNEDKERKDSFVNQMLKLYKDFEDEANKHLKGEDAKSKIRSERLKLYYTQMGKCMYTGKSLDIDRLDTYQVDHIVPQSLLKDDSIDNKVLVLSSENQRKLDDLVIPEMIRNKMFGFWNKLYENKIISPKKFYSLIKSEYSDKDKERFINRQIVETRQITKHVAQIISNHYETTKVVTVRADLSHAFRERYHIYKNRDINDFHHAHDAYIATILGTYIGHRFESLDAKYIYGEYQKIFRNKNKDKKDGFILNSMRNLYADKDTGEVVWDPEWISRIKKCFYYKDCFVTKKLEENNGSFFNTVRPNDEHSEKGAKVPVNKLRSNVHKYGGFEGLKYSIVAIKGKKKKGKKIIDVNKLVGIPLMYKNVDDETKINYIKESEGLEEVKIIKEILKNQLIEINGGLFYVTSEIVNARQLILDFNCTRIIDGIYKAMKYKNYSELSQEEIMNVYDIFVEKLKLYYPTYKNIATNFENFENISDEEKCEVIQMLVVMHAGPQNGNITFDDFKLSNRLGRLNCKTISLTTVFIADSPTGMYSKKYKL

SEQ ID NO: 229 - protein, 1301 aa, Kandleria vitulina
NNKIYNIGLDIGDASVGWAVVDEHYNLLKRHGKHMWGSRLFTQANTAVERRSSRSTRRRYNKRRERIRLLREIMEDMVLDVDPTFFIRLANVSFLDQEDKKDYLKSNYNLFIDKDFNDKTYYDKYPTIYHLRKHLCESKEKEDPRLIYLALHHIVKYRGNFLYEGQKFSMDVSNIEDKMIDVLRQFNEINLFEYVEDKKIDEVLNVLKEPLSKKHKAEKAFALFDTTKDNKAAYKELCAALAGNKFNVTKMLKEAELHDEDEKDISFKFSDATFDDAFVEKQPLLGDCVEFIDLLHDIYSWVELQNILGSAHTSEPSISAAMIQRYEDHKNDLKLLKDVIRKYLPKKYFEVFRDEKSKKNNYCNYINHKTPVDEFYKYIKKLIEKIDDPDVKTILNKIELESFMLKQNSRTNGAVPYQMQLDELNKILENQSVYYSDLKDNEDKIRSILTFRIPYYFGPLITKDRQFDWIIKKEGKENERILPWNANEIVDVDKTADEFIKRMRNFCTYFPDEPVMAKNSLTVSKYEVLNEINKLRINDHLIKRDMKDKMLHTLFMDHKSISANAMKKWLVKNQYFSNTDDIKIEGFQKENACSTSLTPWIDFTKIFGKINESNYDFIEKIIYDVTVFEDKKILRRRLKKEYDLDEEKIKKILKLKYSGWSRLSKKLLSGIKTKRTPETVLEVMETNMNLMQVINDEKLGFKKTIDDANSTSVSGKFSYAEVQELAGSPAIKRGIWQALLIVDEIKKIMKHEPAHVYIEFARNEDKERKDSFVNQMLKLYKDFEDEANKHLKGEDAKSKIRSERLKLYYTQMGKCMYTGKSLDIDRLDTYQVDHIVPQSLLKDDSIDNKVLVLSSENQRKLDDLVIPSSIRNKMYGFWEKLFNNKIISPKKFYSLIKTEFNEKDQERFINRQIVETRQITKHVAQIIDNHYENTKVVTVRADLSHQFRERYHIYKNRDINDFHHAHDAYIATILGTYIGHRFESLDAKYIYGEYKRIFRQKNKGKNDGFILNSMRNIYADKDTGEIVWDPNYIDRIKKCFYYKDCFVTKKLEENNGTFFNTVLPNDTNSDKDATVPVNKYRSNVNKYGGFSGVNSFIVAIKGKKKKGKKVIEVNKLTGIPLMYKNADEEIKINYLKQAEDLEEVQIGKEILKNQLIEKDGGLYYIVAEIINAKQLILNESQTKLVCEIYKAMKYKNYDNLDSEKIIDLYRLLINKMELYYPEYRKQLVKKFEDLKVISIEEKCNIIQILATLHCNSSIGKIMYSDFKISTTIGRLNGRTISLDISFIAESPTGMYSKKYKL

SEQ ID NO: 230 - protein, 1304 aa, Lactobacillus animalis
LKKDYSIGLDIGTNSVGHAVVTDDYKVPTKKMKVFGDTSKKTIKKNMLGVLLFNEGQTAADTRLKRGARRRYTRRKNRLRYLQEIFAPALAKVDPNFFYRLEESSLVAEDKKYDVYPIFGKREEELLYHDTHKTIYHLRSELANNDRPADLRLVYLALAHIIKYRGNFLLEGEIDLRTTDINKVFAEFSETLNENSDENLGKLDVADIFKDNTFSKTKKSEELLKLSGKKNQLAHQLFKMMVGNMGSFKKVLGTDEEHKLSFGKDTYEDDLNDLLAEAGDQYLDIFVAAKKVYDAAILASILDVKDTQTKTVFSQAMIERYEEHQKDLIELKRVFKKYLPEKCHDFFSEPKISGYAGYIDGKVSEEDFYKYTKKTLKGIPETEEILQKIDANNYLRKQRTFDNGAIPHQVHLKELVAIVENQGKYYPFLRENKDKFEKILNFRIPYYVGPLARGNSKFAWLTRAGEGKITPYNFDEMIDKETSAEDFIKRMTINDLYLPTEPVLPKHSLLYERYTIFNELAGVRYVTENGEAKYFDAQTKRSIFELFKLDRKVSEKMVIKHLKVVMPAIRIQALKGLDNGKFNASYGTYKDLVDMGVAPELLNDEVNSEKWEDIIKTLTIFEGRKLIKRRLENYRDFLGEDILRKLSRKKYTGWGRLSAKLLDGIYDKKTHKTILDCLMEDYSQNFMQLINDDTYSFKETIKNAQVIEKEETLAKTVQELPGSPAIKKGILQSLEIVDEIIKVMGYKPKSIVVEMARETQTHGTRKREDRVQQIVKNLKELPKPSNAELSDERKYLYCLQNGRDMYTGAPLDYDHLQFYDVDHIIPQSFLKDDSIENKVLTIKKENVRKTNGLPSEAVIQKMGSFWKKLLDAGAMTNKKYDNLRRNLHGGLNEKLKERFIERQLVETRQITKYVAQLLDQRLNYDGNGVELDEKIAIVTLKAQLASQFRSEFKLRKVRALNNLHHAHDAYLNAVVANLIMAKYPELEPEFVYGKYRKTKFKGLGKATAKNTLYANVLYFLKENEVYPFWDKARDLPTIKRYLYRAQVNKVRKAERQTGGFSDEMLVPKSDSGKLLPRKEGLDPVKYGGYAKAVESYAVLITADEVKKGKTKKVKTLVNIPIIDSKKYEADPTAYLASRGYTNVTNSFILPKYSLLEDPEGRRRYLASKEFQKANELILPQHLVELLYWVNAKDGEQKLEDHKAEFKELFDKIMEFADKYVVAPKNSEKIRRLYEENQDATPMELGKNFVELLRYTADGAASDFKFFGENIPRKRYNSAGSLLNGTLIYQSKTGLYETRIDLGKL

SEQ ID NO: 231 - protein, 1292 aa, Lactobacillus curvatus
MSRPYNIGLDIGTSSIGWSVVDDQSKLVSVRGKYGYGVRLYDEGQTAAERRSFRTTRRRLKRRKWRLGLLREIFEPYITPVDDTFFLRKKQSNLSPKDQRKQTSLFNDRTDRAFYDDYPTIYHLRYKLMTEKRQFDIREIYLAMHHIVKYRGHFLNEAPVSSFKSSEINLVAHFDRLNTIFADLFSESGFTDKLAEVKALLLDNHQSASNRQRQALLLIYTPSKQNKAIATELLKAILGLKAKFNVLTGIEAEDVKTWTLTFNAENFDEEMVKLESSLDDNAHQIIESLQELYSGVLLAGIVPENQSLSQAMITKYDDHQKHLKMLKAVREALAPEDRQRLKQAYDQYVDGKSKEDFYGDITKALKNNPDHPIVSEIKKLIELDQFMPKQRTKDNGAIPHQLHQQELDRIIENQQQYYPWLAELNPNKLDELVAFRVPYYVGPLQQQSSDAKFAWMIRKAEGQITPWNFDDKVDRQASANEFIKRMTTTDTYLLAEDVLPKQSLIYQRFEVLNELNGLKIDDQPITTELKQAIFTDLFMQKTSVTVKNIQDYLVSEKRYASRPAITGLSDENKFNSRLSTYHDLKTIVGDAVDDVDKQADLEKCIEWSTIFEDGKIYSAKLNEIDWLTDQQRVQLAAKRYRGWGRLSAKLLTQIVNANGQRIMDLLWTTDNFMRIVHSEDFDKLITEANQMMLAENDVQDVINDLYTSPQNKKALRQILLVVNDIQKAMKGQAPERILIEFAREDEVNPRLSVQRKRQVEQVYQNISELEIRNELKDLSNSALSNTRLFLYFMQGGRDMYTGDSLNIDRLSTYDIDHILPQSFIKDNSLDNRVLVSQRMNRSKADQVPSVELGQKMQIQWEQMLRAGLITKKKYDNLTLNPDMKGFINRQLVETRQVIKLATNLLMEQYGEDNIELITVKSGLTHQMRTEFDFPKNRNLNNHHHAFDAYLTAFVGLYLLKRYPKLKPYFVYGEYQKASQQDKRNFNFLNGLKKDELVDENTEAVIWNKESGLAYLNKIYQFKKILVTREVHENSGALFNQTLYAAKDDKASGQLIPAKQDRPTALYGGYSGKTVAYMCIVRIKNKKGDLYKVCGVETSWLAQLKQKKAFLKQKISPQFTKVKKQKGTIVKVVEDFEVIAPHILINQRFFDNGQELTLGSHNEQELILDKTAVKLLNGALPLTQSEELAEQVYDEILDQVMHYFPLYDTNQFRAKLSAGKAADGNKMVQVGQQVILDRVLIGLHANAAVSDLGVLKISTPLGKMQQPSGISDTQIIYQSPTGLFERRVALRDL

SEQ ID NO: 232 - protein, 1291 aa, Lactobacillus farciminis
KEQPYNIGLDIGTGSVGWAVTNDNYDLLNIKKKNLWGVRLFEGAQTAKETRLNRSTRRRYRRRKNRINWLNEIFSEELANTDPSFLIRLQNSWVSKKDPDRKRDKYNLFIDNPYTDKEYYREFPTIFHLRKELIINKNKADIRLVYLALHNILKYRGNFTYEHQKFNISTLNSNLSKELIELNQQLIKYDISFPDNCDWNHISDILIGRGNATQKSSNILNNFTKETKKLLKEVINLILGNVAHLNTIFKTSLTKDEEKLSFSGKDIESKLDDLDSILDDDQFTVLDTANRIYSTITLNEILNGESYFSMAKVNQYENHAIDLCKLRDMWHTTKNEKAVGLSRQAYDDYINKKKELYTSLKKFLKVALPTNLAKEAEEKISKGTYLVKPRNSENGVVPYQLNKIEMEKIIDNQSQYYPFLKENKEKLLSILSFRIPYYVGPLQSSEKNPFAWMERKSNGHARPWNFDEIVDREKSSNKFIRRMTVTDSYLVGEPVLPKNSLIYQRYEVLNELNNIRITENLKTNPTGSRLTVETKQHIYNELFKNYKKITVKKLTKWLIAQGYYKNPILIGLSQKDEFNSTLTTYLDMKKIFGSSFMENNKNYNQIEELIEWLTIFEDKQILNEKLHSSNYSYTSDQIKKISNMRYKGWGRLSKKILTCITTETNTPKSLQLSNDLMWTTNNNFISIISNDKYDFKNYIENHNLNKNEDQNISNLVNDIHVSPALKRGITQSIKIVQEIVKFMGHAPKYIFIEVTRETKTTSRGKRIQRLQSKLLNKANGLVPEELKKHKNDLSSERIMLYFLQNGKSLYSEESLNINKLSDYQVDHILPRTYIPDDSLENKALVLAKENQRKADDLLLNSNVIDKNLERWTYMLNNNMMGLKKFKNLTRRVITDKDKLGFIHRQLVQTSQMVKGVANILNSMYKNQGTTCIQARANLSTAFRKALELVKNRNINDFHHAQDAYLASFLGTYRLRRFPTDEMLLMNGEYNKFYGKELYSKKSRKNGFIISPLVNGTTQDRNTGEIIWNVGFRDKILKIFNYHQCNVTRKTEIKTGQFYDQTIYSPKNPKKLIAQKKDMDPNIYGGFSGDNKSSITIVKIDNNKIKPVAIPIRLINDKKTLQNWLEENVKHKKSIQIIKNNVPIGQIIYSKKVGLLSREIANRQQLILPPEHSALLRILQIPDEDPDQILAFYDKNILVEILQELITKMKKFYPFYKNEQEFLASFNQATTSEKINSLEELITLLHANSTSAHLIFNNIEKKAFGRKTHGLTDTDFIYQSVTGLYETRIHIE

SEQ ID NO: 233 - protein, 1327 aa, Listeria innocua
MKKPYTIGLDIGTNSVGWAVLTDQYDLVKRKMKIAGDSEKKQIKKNFWGVRLFDEGQTAADRRMARTARRRIERRRNRISYLQGIFAEEMSKTDANFFCRLSDSFYVDNEKRNSRHPFFATIEEEVEYHKNYPTIYHLREELVNSSEKADLRLVYLALAHIIKYRGNFLIEGALDTQNTSVDGIYKQFIQTYNQVFASGIEKLEDNKDVAKILVEKVTRKEKLERILKLYPGEKSAGMFAQFISLIVGSKGNFQKPFDLIEKSDIECAKDSYEEDLESLLALIGDEYAELFVAAKNAYSAVVLSSIITVAETETNAKLSASMIERFDTHEEDLGELKAFIKLHLPKHYEEIFSNTEKHGYAGYIDGTKQADFYKYMKMTLENIEGADYFIAKIEKENFLRKQRTFDNGAIPHQLHLEELEAILHQQAKYYPFLKENYDKIKSLVTFRIPYFVGPLANGQSEFAWLTRKADGEIRPWNIEEKVDFGKSAVDFIEKMTNKDTYLPKENVLPKHSLCYQKYLVYNELTKVRYINDQGKTSYFSGQEKEQIFNDLFKQKRKVKKKDLELFLRNMSHVESPTIEGLEDSFNSSYSTYHDLLKVGIKQEILDNPVNTEMLENIVKILTVFEDKRMIKEQLQQFSDVLDGVVLKKLERRHYTGWGRLSAKLLMGIRDKQSHLTILDYLMDDGLNRNLMQLINDSNLSFKSIIEKEQVTTADKDIQSIVADLAGSPAIKKGILQSLKIVDELVSVMGYPPQTIVVEMARENQTTGKGKNNSRPRYKSLEKAIKEFGSQILKEHPTDNQELRNNRLYLYYLQNGKDMYTGQDLDIHNLSNYDIDHIVPQSFITDNSIDNLVLTSSAGNREKGDDVPPLEIVRKRKVFWEKLYQGNLMSKRKFDYLTKAERGGLTEADKARFIHRQLVETRQITKNVANILHQRFNYEKDDHGNTMKQVRIVTLKSALVSQFRKQFQLYKVRDVNDYHHAHDAYLNGVVANTLLKVYPQLEPEFVYGDYHQFDWFKANKATAKKQFYTNIMLFFAQKDRIIDENGEILWDKKYLDTVKKVMSYRQMNIVKKTEIQKGEFSKATIKPKGNSSKLIPRKTNWDPMKYGGLDSPNMAYAVVIEYAKGKNKLVFEKKIIRVTIMERKAFEKDEKAFLEEQGYRQPKVLAKLPKYTLYECEEGRRRMLASANEAQKGNQQVLPNHLVTLLHHAANCEVSDGKSLDYIESNREMFAELLAHVSEFAKRYTLAEANLNKINQLFEQNKEGDIKAIAQSFVDLMAFNAMGAPASFKFFETTIERKRYNNLKELLNSTIIYQSITGLYESRKRLDD

SEQ ID NO: 234 - protein, 1327 aa, Listeria innocua
MKKPYTIGLDIGTNSVGWAVLTDQYDLVKRKMKIAGDSEKKQIKKNFWGVRLFDEGQTAADRRMARTARRRIERRRNRISYLQGIFAEEMSKTDANFFCRLSDSFYVDNEKRNSRHPFFATIEEEVEYHKNYPTIYHLREELVNSSEKADLRLVYLALAHIIKYRGNFLIEGALDTQNTSVDGIYKQFIQTYNQVFASGIEKLEDNKDVAKILVEKVTRKEKLERILKLYPGEKSAGMFAQFISLIVGSKGNFQKPFDLIEKSDIECAKDSYEEDLESLLALIGDEYAELFVAAKNAYSAVVLSSIITVAETETNAKLSASMIERFDTHEEDLGELKAFIKLHLPKHYEEIFSNTEKHGYAGYIDGTKQADFYKYMKMTLENIEGADYFIAKIEKENFLRKQRTFDNGAIPHQLHLEELEAILHQQAKYYPFLKENYDKIKSLVTFRIPYFVGPLANGQSEFAWLTRKADGEIRPWNIEEKVDFGKSAVDFIEKMTNKDTYLPKENVLPKHSLCYQKYLVYNELTKVRYINDQGKTSYFSGQEKEQIFNDLFKQKRKVKKKDLELFLRNMSHVESPTIEGLEDSFNSSYSTYHDLLKVGIKQEILDNPVNTEMLENIVKILTVFEDKRMIKEQLQQFSDVLDGVVLKKLERRHYTGWGRLSAKLLMGIRDKQSHLTILDYLMDDGLNRNLMQLINDSNLSFKSIIEKEQVTTADKDIQSIVADLAGSPAIKKGILQSLKIVDELVSVMGYPPQTIVVEMARENQTTGKGKNNSRPRYKSLEKAIKEFGSQILKEHPTDNQELRNNRLYLYYLQNGKDMYTGQDLDIHNLSNYDIDHIVPQSFITDNSIDNLVLTSSAGNREKGDDVPPLEIVRKRKVFWEKLYQGNLMSKRKFDYLTKAERGGLTEADKARFIHRQLVETRQITKNVANILHQRFNYEKDDHGNTMKQVRIVTLKSALVSQFRKQFQLYKVRDVNDYHHAHDAYLNGVVANTLLKVYPQLEPEFVYGDYHQFDWFKANKATAKKQFYTNIMLFFAQKDRIIDENGEILWDKKYLDTVKKVMSYRQMNIVKKTEIQKGEFSKATIKPKGNSSKLISRKTNWDPMKYGGLDSPNMAYAVVIEYAKGKNKLVFEKKIIRVTIMERKAFEKDEKAFLEEQGYRQPKVLAKLPKYTLYECEEGRRRMLASANEAQKGNQQVLPNHLVTLLHHVANCEVSDGKSLDYIESNREMFAELLAHVSEFAKRYTLAEANLNKINQLFEQNKEGDIKAIAQSFVDLMAFNAMGAPASFKFFETTIERKRYNNLKELLNSTIIYQSITGLYESRKRLDD

SEQ ID NO: 235 - protein, 1327 aa, Listeria innocua; identical to SEQ ID NO: 234
  source 1..1327: note = ATCC 33091

SEQ ID NO: 236 - protein, 1101 aa, Listeria innocua
  source 1..1101: note = FSL S4-378
LKLYPGEKSTGMFAQFISLIVGSKGNFQKPFDLIEKSDIECAKDSYEEDLESLLALIGDEYAELFVAAKNAYSAVVLSSIITVAETETNAKLSASMIERFDTHEEDLGELKAFIKLHLPKHYEEIFSNTEKHGYAGYIDGTKQADFYKYMKTTLENIEGADYFIAKIEKENFLRKQRTFDNGAIPHQLHLEELEAILHQQAKYYPFLKENYDKIKSLVTFRIPYFVGPLANGQSEFAWLTRKADGEIRPWNIEEKVDFGKSAVDFIEKMTNKDTYLPKENVLPKHSLCYQKYLVYNELTKVRYINDQGKTSYFSGQEKEQIFNDLFKQKRKVKKKDLELFLRNMSHVESPTIEGLEDSFNSSYSTYHDLLKVGIKQEILDNPVNTEMLENIVKILTVFEDKRMIKEQLQQFSDVLDGVVLKKLERRHYTGWGRLSAKLLMGIRDKQSHLTILDYLMDDGLNRNLMQLINDSNLSFKSIIEKEQVTTADKDIQSIVADLAGSPAIKKGILQSLKIVDELVSVMGYPPQTIVVEMARENQTTGKGKNNSRPRYKSLEKAIKEFGSQILKEHPTDNQELKNNRLYLYYLQNGKDMYTGQDLDIHNLSNYDIDHIVPQSFITDNSIDNLVLTSSAGNREKGNDVPPLEIVQKRKVFWEKLYQGNLMSKRKFDYLTKAERGGLTEADKARFIHRQLVETRQITKNVANILHQRFNYGKDDHGNTMKQVRIVTLKSALVSQFRKQFQLYKVRGVNDYHHAHDAYLNGVVANTLLKVYPQLEPEFVYGDYHQFDWFKANKATAKKQFYTNIMLFFAQKDRIIDENGEILWDKKYLDTVKKVMSYRQMNIVKKTEIQKGEFSKATIKPKGNSSKLIPRKTNWDPMKYGGLDSPNMAYAVVIEYAKGKNKLVFEKKIIRVTIMERKAFEKDEKAFLEEQGYRQPKVLAKLPKYTLYECEEGRRRMLASANEAQKGNQQVLPNHLVTLLHHAANCEVSDGKSLDYIESNREMFAELLAHVSEFAKRYTLAEANLNKINQLFEQNKEGDIKAIAQSFVDLMAFNAMGAPASFKFFETTIERKRYNNLKELLNSTIIYQSITGLYESRKRLDD

SEQ ID NO: 237 - protein, 1327 aa, Listeria ivanovii
MRKPYTIGLDIGTNSVGWAVLTDQYNLVKRKMKVAGSAEKKQIKKNFWGVRLFDEGEVAAGRRMNRTTRRRIERRRNRIAYLQEIFAAEMAEVDANFFYRLEDSFYIESEKRHSRHPFFATIEEEVAYHEEYKTIYHLREKLVNSSDKADLRLVYLALAHIIKYRGNFLIEGMLDTKNTSVDEVFKQFIQTYNQIFASDIERLEENKEVAEILSEKLTRREKLDKILKLYTGEKSTGMFARFINLIIGSKGDFKKVFDLDEKAEIECAKDTYEEDLEALLAKIGDEYAEIFVAAKSTYNAVVLSNIITVTDTETKAKLSASMIERFDKHAKDLKRLKAFFKMQLPEKFNEVFNDIEKDGYAGYIDGTTQEKFYKYMKKMLANIDGADYFIDQIEEENFLRKQRTFDNGTIPHQLHLEELEAILHQQAKYYPFLRKDYEKIRSLVTFRIPYFIGPLANGQSDFAWLTRKADGEIRPWNIEEKVDFGKSAIDFIEKMTNKDTYLPKENVLPKHSLCYQKYMVYNELTKIRYIDDQGKTHHFSGQEKQQIFNGLFKQQRKVKKKDLERFLYTINHIESPTIEGVEDAFNSSFATYHDLQKGGVTQEILDNPLNADMLEEIVKILTVFEDKRMIKEQLQSFSDVLDGTILKKLERRHYTGWGRLSAKLLTGIRDKHSHLTILDYLMDDGLNRNLMQLINDSNLSFKSIIEKEQVSTADKGIQSIVAELAGSPAIKKGILQSLKIVDELVGIMGYPPQTIVVEMARENQTTGKGKNNSKPRFISLEKAIKEFGSQILKEHPTDNQCLKNDRLYLYYLQNGKDMYTGKELDIHNLSNYDIDHIIPQSFITDNSIDNRVLVSSTANREKGDNVPLLEVVRKRKAFWEKLYQAKLMSKRKFDYLTKAERGGLTEADKANFIQRQLVETRQITKNVANILYQRFNCKQDENGNEVEQVRIVTLKSTLVSQFRKQFQLYKVREVNDYHHAHDAYLNGVVANTLLKVYPQLEPEFVYGDYHQFDWFKANKATAKKQFYTNIMRFFAKENQIIDKNGEILWDNRYLDTIKKVLSYRQMNIVKKTEIQKGEFSNATVNPKGNSSKLISRKADWNPIKYGGFDGSNMAYSIVIEYEKRKKKTVIKKELIQINIMERVAFEKDQKAFLEEKGYYSPKVLTKIPKYTLYECENGRRRMLGSANEAQKGNQMVLPNHLMTLLYHAKNCEANDGESLAYIEMHREMFAELLAYISEFAKRYTLANDRLEKINMFFEQNKKGDIKVIAKSFDKLKVFNAFGAPRDFEFFETTIKRKRYYNIKELLNATIIYQSITGLYEARKRLED

SEQ ID NO: 238 - protein, 952 aa, Listeria ivanovii
  source 1..952: note = FSL F6-596
MKKMLANIDGADYFIDQIEEENFLRKQRTFDNGTIPHQLHLEELEAILHQQAKYYPFLRKDYEKIRSLVTFRIPYFIGPLANGQSDFAWLTRKADGEIRPWNIEEKVDFGKSAIDFIEKMTNKDTYLPKENVLPKHSLCYQKYMVYNELTKIRYIDDQGKTHHFSGQEKQQIFNGLFKQQRKVKKKDLERFLYTINHIESPTIEGVEDAFNSSFATYHDLQKGGVTQEILDNPLNADMLEEIVKILTVFEDKRMIKEQLQSFSDVLDGTILKKLERRHYTGWGRLSAKLLTGIRDKHSHLTILDYLMDDGLNRNLMQLINDSNLSFKSIIEKEQVSTADKGIQSIVAELAGSPAIKKGILQSLKIVDELVGIMGYPPQTIVVEMARENQTTGKGKNNSKPRFISLEKAIKEFGSQILKEHPTDNQCLKNDRLYLYYLQNGKDMYTGKELDIHNLSNYDIDHIIPQSFITDNSIDNRVLVSSTANREKGDNVPLLEVVRKRKAFWEKLYQAKLMSKRKFDYLTKAERGGLTEADKANFIQRQLVETRQITKNVANILYQRFNCKQDENGNEVEQVRIVTLKSTLVSQFRKQFQLYKVREVNDYHHAHDAYLNGVVANTLLKVYPQLEPEFVYGDYHQFDWFKANKATAKKQFYTNIMRFFAKENQIIDKNGEILWDNRYLDTIKKVLSYRQMNIVKKTEIQKGEFSNATVNPKGNSSKLISRKADWNPIKYGGFDGSNMAYSIVIEYEKRKKKTVIKKELIQINIMERVAFEKDQKAFLEEKGYYSPKVLTKIPKYTLYECENGRRRMLGSANEAQKGNQMVLPNHLMTLLYHAKNCEANDGESLAYIEMHREMFAELLAYISEFAKRYTLANDRLEKINMFFEQNKKGDIKVIAKSFDKLKVFNAFGAPRDFEFFETTIKRKRYYNIKELLNATIIYQSITGLYEARKRLED

SEQ ID NO: 239 - protein, 1327 aa, Listeria monocytogenes
MKNPYTIGLDIGTNSVGWAVLTNQYDLVKRKMKVAGNSDKKQIKKNFWGVRLFDDGQTAVDRRMNRTARRRIERRRNRISYLQEIFAVEMANIDANFFCRLNDSFYVDSEKRNSRHPFFATIEEEVAYHDNYRTIYHLREKLVNSSEKADLRLVYLALAHIIKYRGNFLIEGALDTKNTSVDEVYKQFIETYNQVFMSNIEKVEENIEVANILAGKFTRREKFERILQLYPGEKSTGMFAQFISLIVGSKGNFQKVFDLIEKTDIECAKDSYEEDLETLLAIIGDEYAELFVAAKNTYNAVVLSSIITVTDTETNAKLSASMIERFDAHEKDLVELKAFIKLNLPKQYEEIFSNAAIDGYAGYIDGTKQVDFYKYLKTILENIEGSDYFIAKIEEENFLRKQRTFDNGAIPHQLHLEELEAIIHQQAKYYPFLKEDYDKIKSLVTFRIPYFVGPLANGQSEFAWLTRKADGEIRPWNIEEKVDFGKSAVDFIEKMTNKDTYLPKENVLPKHSLCYQKYMVYNELTKIRYIDDQGKTNYFSGREKQQVFNDLFKQKRKVKKKDLELFLRNINHIESPTIEGLEDSFNASYATYHDLLKVGMKQEILDNPLNTEMLEDIVKILTVFEDKPMIKEQLQQFSDVLDGGVLKKLERRHYTGWGRLSAKLLVGIREKQSHLTILDYLMDDGLNRNLMQLINDSNLSFKSIIEKEQVSTTDKDLQSIVAELAGSPAIKKGILQSLKIVDELVSIMGYPPQTIVVEMARENQTTGKGKNNSKPRYKSLEKAIKEFGSQILKEHPTDNQELKNNRLYLYYLQNGKDMYTGQELDIHNLSNYDIDHIVPQSFITDNSIDNLVLTSSAGNREKGGDVPPLEIVRKRKVFWEKLYQGNLMSKRKFDYLTKAERGGLTEADKARFIHRQLVETRQITKNVANILYQRFNKETDNHGNTMEQVRIVTLKSALVSQFRKQFQLYKVREVNGYHHAHDAYLNGVVANTLLKVYPQLEPEFVYGEYHQFDWFKANKATAKKQFYTNIMLFFAQKERIIDENGEILWDKKYLETIKKVLDYRQMNIVKKTEIQKGEFSKATIKPKGNSSKLIPRKENWDPMKYGGLDSPNMAYAVIIEHAKGKKKIVIEKKLIQINIMERKMFEKDEEAFLEEKGYRHPKVLTKLPKYTLYECEKGRRRMLASANEAQKGNQLVLSNHLVSLLYHAKNCEASDGKSLKYIEAHRETFSELLAQVSEFATRYTLADANLSKINNLFEQNKEGDIKAIAQSFVDLMAFNAMGAPASFKFFEATIDRKRYTNLKELLSSTIIYQSITGLYESRKRLDD

SEQ ID NO: 240 - protein, 1327 aa, Listeria monocytogenes
MKNPYTIGLDIGTNSVGWAVLTDQYDLVKRKMKVAGNSDKKQIKKNFWGVRLFDDGQTAVDRRMNRTARRRIERRRNRISYLQEIFAVEMANIDANFFCRLNDSFYVDSEKRNSRHPFFATIEEEVAYHKNYRTIYHLREELVNSSEKADLRLVYLALAHIIKYRGNFLIEGALDTKNTSVDEVYKQFIQTYNQVFMSNIEKVEENTEVASILAGKFTRREKFERILRLYPGEKSTGMFAQFISLIVGNKGNFQKVFNLVEKTDIECAKDSYEEDLEALLAIIGDEYAELFVAAKNTYNAVVLSSIITVTATETNAKLSASMIERFDAHEKELGELKAFIKLHLPKQYQEIFNNAEIDGYAGYIDGTKQVDFYKYLKTTLENVEGADYFITKIEEENFLRKQRTFDNGVIPHQLHLEELEAILHQQAKYYPFLREGYDKIKSLVTFRIPYFVGPLANGQSEFAWLTRKDDGEIRPWNIEEKVDFGKSAVDFIEKMTNKDTYLPKENVLPKHSLCYQKYMVYNELTKIRYIDDQGKTNYFSGREKQQIFNDLFKQKRKVKKKDLELFLRNINHIESPTIEGLEDSFNASYATYHDLLKVGLKQEILDNPLNTEILEDIVKILTVFEDKRMIKEQLEQFSDVLDGVVLKKLERRHYTGWGRLSAKLLVGIRDKQSHLTILDYLMDDGLNRNLMQLINDSNLSFKSIIEKEQVSTTDKDLQSIVADLAGSPAIKKGILQSLKIVDELVSIMGYPPQTIVVEMARENQTTGKGKNNSKPRYKSLEKAIKDFGSQILKEHPTDNQELKNNRLYLYYLQNGKDIYTGQELDIHNLSNYDIDHIVPQSFITDNSIDNLVLTSSAGNREKGGDVPPLEIVRKRKVFWEKLYQGNLMSKRKFDYLTKAERGGLTEADKARFIHRQLVETRQITKNVANILHQRFNKETDNHGNTMEQVRIVTLKSALVSQFRKQFQLYKVREVNDYHHAHDAYLNGVVANTLLKVYPQLEPEFVYGEYHQFDWFKANKATAKKQFYTNIMLFFAQKERIIDENGEILWDKKYLETIKKVLDYRQINIVKKTEIQKGEFSKATIKPKGNSSKLIPRKENWDPMKYGGLDSPNMAYAVIIEHAKGKKKIVIEKKLIQINIMERKMFEKDEEAFLEEKGYHQPKVLTKLPKYTLYECEKGRRRMLSSANEAQKGNQLVLSNHLVSLLYHAKNCEASDGKSLKYIEAHRETFSELLAQVSEFATKYTLADANLSKINNLFEQNKEGDIKAIAQSFVDLMAFNAMGAPASFKFFEATIDRKRYTNLKELLSSTIIYQSITGLYESRKRLDD

SEQ ID NO: 241 - protein, 1327 aa, Listeria monocytogenes
MKNPYTIGLDIGTNSVGWAVLTDQYDLVKRKMKVAGNSDKKQIKKNFWGVRLFDDGQTAVDRRMNRTARRRIERRRNRISYLQEIFAVEMANIDANFFCRLNDSFYVDSEKRNSRHPFFATIEEEVAYHKNYRTIYHLREELVNSSEKADLRLVYLALAHIIKYRGNFLIEGALDTKNTSVDEVYKQFIQTYNQVFMSNIEKVEENTEVASILAGKFTRREKFERILRLYPGEKSTGMFAQFISLIVGNKGNFQKVFNLVEKTDIECAKDSYEEDLEALLAIIGDEYAELFVAAKNTYNAVVLSSIITVTATETNAKLSASMIERFDAHEKELGELKAFIKLHLPKQYQEIFNNAEIDGYAGYIDGTKQVDFYKYLKTTLENVEGADYFITKIEEENFLRKQRTFDNGVIPHQLHLEELEAILHQQAKYYPFLREGYDKIKSLVTFRIPYFVGPLANGQSEFAWLTRKDDGEIRPWNIEEKVDFGKSAVDFIEKMTNKDTYLPKENVLPKHSLCYQKYMVYNELTKIRYIDDQGKTNYFSGREKQQIFNDLFKQKRKVKKKDLELFLRNINHIESPTIEGLEDSFNASYATYHDLLKVGLKQEILDNPLNTEILEDIVKILTVFEDKRMIKEQLEQFSDVLDGVVLKKLERRHYTGWGRLSAKLLVGIRDKQSHLTILDYLMDDGLNRNLMQLINDSNLSFKSIIEKEQVSTTDKDLQSIVADLAGSPAIKKGILQSLKIVDELVSIMGYPPQTIVVEMARENQTTGKGKNNSKPRYKSLEKAIKDFGSQILKEHPTDNQELKNNRLYLYYLQNGKDIYTGQELDIHNLSNYDIDHIVPQSFITDNSIDNLVLTSSAGNREKGGDVPPLEIVRKRKVFWEKLYQGNLMSKRKFDYLTKAERGGLTEADKARFIHRQLVETRQITKNVANILHQRFNKETDNHGNTMEQVRIVTLKSALVSQFRKQFQLYKVREVNDYHHAHDAYLNGVVANTLLKVYPQLEPEFVYGEYHQFDWFKANKATAKKQFYTNIMLFFAQKERIIDENGEILWDKKYLETIKKVLDYRQINIVKKTEIQKGEFSKATIKPKGNSSKLIPRKENWDPVKYGGLDSPNMAYAVIIEHAKGKKKIVIEKKLIQINIMERKMFEKDEEAFLEEKGYHQPKVLTKLPKYTLYECEKGRRRMLSSANEAQKGNQLVLSNHLVSLLYHAKNCEASDGKSLKYIEAHRETFSELLAQVSEFATKYTLADANLSKINNLFEQNKEGDIKAIAQSFVDLMAFNAMGAPASFKFFEATIDRKRYTNLKELLSSTIIYQSITGLYESRKRLDD

SEQ ID NO: 242 - protein, 1327 aa, Listeria monocytogenes
MKKPYTIGLDIGTNSVGWAVLTDQYDLVKRKMKISGDSEKKQIKKNFWGVRLFEKGETAAKRRMSRTARRRIERRRNRISYLQEIFAIQMNEVDDNFFNRLKESFYAESDKKYNRHPFFGTVEEEVAYYKDFPTIYHLRKELIDSQKKADLRLVYLALAHIIKYRGHFLIEGALDTKNTSIDEMFKQFLQIYNQVFANDIEKTEKNQEVAQILAEKFTRKDKLDKILSLYPGEKTTGVFAQFVNIIVGSTGKFKKHFNLHEKKDINCAEDTYDTDLESLLAIIGDEFAEVFVAAKNAYNAVVLSNIITVTDSTTRAKLSASLIERFENHKEDLKKMKRFVRTYLPEKYDEIFDDTEKHGYAGYISGTKQADFYKYMKATLEKIEGADYFIAKIEEENFLRKQRTFDNGVIPHQLHLEELEAILHQQAKYYPFLREDYEKIKSLVTFRIPYFVGPLAKGQSEFAWLTRKADGEIRPWNIEEKVDFGKSAVDFIEKMTNKDTYLPKENVLPKHSLCYQKYMVYNELTKVRYIDDQGKTNYFSGQEKQQIFNDLFKQKRKVKKKDLELFLRNINQIESPTIEGLEDSFNASYATYHDLLKVGMKQEILDNPLNTEMLEDIVKILTVFEDKRMIKEQLQQFSDVLDGTVLKKLERRHYTGWGRLSAKLLVGIRDKQSHLTILDYLMDDGLNRNLMQLINDSNLSFKSIIEKEQVSTTDKDLQSIVAELAGSPAIKKGILQSLKIVDELVSVMGYPPQTIVVEMARENQTTNKGKNNSKPRYKSLEKAIKEFGSQILKEHPTDNQELKNNRLYLYYLQNGKDMYTGQELDIHNLSNYDIDHIVPQSFITDNSVDNLVLTSSAGNREKGDNVPPLEIVQKRKIFWEKLYQGNLMSKRKFDYLTKAERGGLTEADKARFIHRQLVETRQITKNVANILHQRFNYKTDGNKDTMETVRIVTLKSALVSQFRKQFQFYKVREVNDYHHAHDAYLNGVVANTLLKVYPQLEPEFVYGEYHQFGWFKANKATAKKQFYTNIMLFFAQKDRIIDENGEILWDKRYLETVKKVLGYRQMNIVKKTEIQKGEFSNVTPNPKGKSNKLIPRKKDWDPIKYGGFDGSKMAYAIIIEYEKQKRKVRIEKKLIQINIMEREAFEKDEKTFLEEKGYHQPKVLIKVPKYTLYECKNGRRRMLGSANEAHKGNQMLLPNHLMALLYHAEKYEAIDGESLAYIEVHRALFDELLAYISEFARKYTLSNDRLDEINMLYERNKDGDVKSIAESFVSLKKFNAFGVHQDFSFFGTKIERKRDRKLNELLNSTIIYQSITGLYESRKRLDN

SEQ ID NO: 243 - protein, 1327 aa, Listeria monocytogenes
MKNPYTIGLDIGTNSVGWAVLTDQYDLVKRKMKVAGNSDKKQIKKNFWGVRLFDEGETAADRRMNRTARRRIERRRNRISYLQEIFALEMANIDANFFCRLNDSFYVDSEKRNSRHPFFATIEEEVAYHKNYRTIYHLREELVNSSEKADLRLVYLALAHIIKYRGNFLIEGALDTKNTSVDGVYKQFIQTYNQVFISNIEKMEENTTVADILAGKFTRKEKLERILQLYPGEKSTGMFAQFISLIVGSKGNFQKVFDLVEKTDIECAKDSYEEDLEALLAIIGDEYAELFVAAKNTYNAVVLSSIITVTDTETNAKLSASMIERFDAHEKDLSELKAFIKLHLPKQYEEIFSNVAIDGYAGYIDGTKQVDFYKYLKTLLENIEGADYFIAKIEEENFLRKQRTFDNGAIPHQLHLEELEAILHQQAKYYPFLKEAYDKIKSLVTFRIPYFVGPLANGQSDFAWLTRKADGEIRPWNIEEKVDFGKSAVDFIEKMTNKDTYLPKENVLPKHSLYYQKYMVYNELTKVRYIDDQGKTNYFSGQEKQQIFNDYFKQKRKVSKKDLEQFLRNMSHIESPTIEGLEDSFNSSYATYHDLLKVGIKQEVLENPLNTEMLEDIVKILTVFEDKRMIKEQLQQFSDVLDGAVLKKLERRHYTGWGRLSAKLLVGIRDKQSHLTILDYLMDDGLNRNLMQLINDSNLSFKSIIEKEQVSTTDKDLQSIVADLAGSPAIKKGILQSLKIVDELVSIMGYPPQTIVVEMARENQTTVKGKNNSRPRYKSLEKAIKEFGSQILKEHPTDNQELRNNRLYLYYLQNGKDMYTGQELDIHNLSNYDIDHIVPQSFITDNSIDNLVLTSSAGNREKGDDVPPLEIVRKRKVFWEKLFQGNLMSKRKFDYLTKAERGGLTEADKATFIHRQLVETRQITKNVANILHQRFNNETDNHGNNMEQVRIVMLKSALVSQFRKQFQLYKVREVNDYHHAHDAYLNGVVANTLLKVYPQLEPEFVYGEYHQFDWFKANKATAKKQFYTNIMLFFAQKERIIDENGEILWDKKYLETIKKVLDYRQMNIVKKTEIQKGEFSKATIKPKGNSSKLIPRKENWDPMKYGGLDSPNMAYAVIIEHAKGKKKVVFEKKIIRITIMERKAFEKDEKSFLEKQGYRQPKVLTKLPKYTLYECENGRRRMLASANEAQKGNQQVLKGQLITLLHHAKNCEASDGKSLDYIESNREMFGELLAHVSEFAKRYTLADANLSKINQLFEQNKDNDIKVIAQSFVNLMAFNAMGAPASFKFFEATIERKRYTNLKELLSATIIYQSITGLYEARKRLDG

SEQ ID NO: 244 - protein, 1327 aa, Listeria monocytogenes
MKNPYTIGLDIGTNSVGWAVLTNQYDLVKRKMKVAGNSDKKQIKKNFWGVRLFDDGQTAVDRRMNRTARRRIERRRNRISYLQEIFAVEMANIDANFFCRLNDSFYVDSEKRNSRHPFFATIEEEVAYHKNYRTIYHLREELVNSSEKADLRLVYLALAHIIKYRGNFLIEGALDTKNTSVDGVYEQFIQTYNQVFMSNIEKVEENIEVANILAGKFTRREKFERILQLYPGEKSTGMFAQFISLIVGSKGNFQKVFDLIEKTDIECAKDSYEEDLEALLAIIGDEYAELFVAAKNTYNAVVLSSIITVTATETNAKLSASMIERFDAHEKDLGELKAFIKLHLPKQYQEIFNNAAIDGYAGYIDGTKQVDFYKYLKTILENIEGADYFIAKIEEENFLRKQRTFDNGAIPHQLHLEELEAIIHQQAKYYPFLREDYEKIKSLVTFRIPYFVGPLAKGQSEFAWLTRKADGEIRPWNIEEKVDFGKSAVDFIEKMTNKDTYLPKENVLPKHSLCYQKYMVYNELTKVRYIDDQGKTNYFSGQEKQQIFNDLFKQKRKVKKKDLELFLRNINHIESPTIEGLEDSFNASYATYHDLLKVGMKQEILDNPLNTEMLEDIVKILTVFEDKPMIKEQLQQFSDVLDGGVLKKLERRHYTGWGRLSAKLLVGIREKQSHLTILDYLMDDGLNRNLMQLINDSNLSFKSIIEKEQVSTTDKDLQSIVADLAGSPAIKKGILQSLKIVDELVSIMGYPPQTIVVEMARENQTTGKGKNNSKPRYKSLEKAIKEFGSKILKEHPTDNQELKNNRLYLYYLQNGKDMYTGQELDIHNLSNYDIDHIVPQSFITDNSIDNLVLTSSAGNREKGGDVPPLEIVRKRKVFWEKLYQGNLMSKRKFDYLTKAERGGLTDADKARFIHRQLVETRQITKNVANILHQRFNNETDNHGNTMEQVRIVTLKSALVSQFRKQFQLYKVREVNDYHHAHDAYLNGVVANTLLKVYPQLEPEFVYGEYHQFDWFKANKATAKKQFYTNIMLFFGQKERIIDENGEILWDKKYLETIKKVLDYRQMNIVKKTEIQKGEFSKATIKPKGNSSKLIPRKENWDPMKYGGLDSPNMAYAVIIEHAKGKKKLIFEKKIIRITIMERKMFEKDEEAFLEEKGYRHPKVLTKLPKYTLYECEKGRRRMLASANEAQKGNQLVLSNHLVSLLYHAKNCEASDGKSLKYIEAHRETFSELLAQVSEFATRYTLADANLSKINNLFEQNKEGDIQAIAQSFVDLMAFNAMGAPASFKFFEATIDRKRYTNLKELLSSTIIYQSITGLYESRKRLDD

SEQ ID NO: 245 - protein, 1327 aa, Listeria monocytogenes
MKNPYTIGLDIGTNSVGWAVLTNQYDLVKRKMKVAGNSDKKQIKKNFWGVRLFDDGQTAVDRRMNRTARRRIERRRNRISYLQEIFAVEMANIDANFFCRLNDSFYVDSEKRNSRHPFFATIEEEVAYHKNYRTIYHLREELVNSSEKADLRLVYLALAHIIKYRGNFLIEGALDTKNTSVDGVYEQFILTYNQVFMSNIEKVEENIEVANILAGKFTRREKFERILQLYPGEKSTGMFAQFISLIVGSKGNFQKVFDLIEKTDIECAKDSYEEDLETLLAIIGDEYAELFVAAKNTYNAVVLSSIITVTDTETNAKLSASMIERFDAHEKDLVELKAFIKLNLPKQYEEIFSNAAIDGYAGYIDGTKQVDFYKYLKTTLENVEGADYFITKIEEENFLRKQRTFDNGVIPHQLHLEELEAILHQQAKYYPFLREDYEKIKSLVTFRIPYFVGPLAKGQSEFAWLTRKADGEIRPWNIEEKVDFGKSAVDFIEKMTNKDTYLPKENVLPKHSLCYQKYMVYNELTKIRYIDDQGKTNYFSGQEKQQIFNDLFKQKRKVKKKDLELFLRNINHVESPTIEGLEDSFNASYATYHDLMKVGIKQEILDNPLNTEMLEDIVKILTVFEDKRMIKEQLQQFSDVLDGTVLKKLERRHYTGWGRLSAKLLVGIRDKQSHLTILDYLMDDGLNRNLMQLINDSNLSFKSIIEKEQVSTADKDLQSIVADLAGSPAIKKGILQSLKVVEELVSVMGYPPQTIVVEMARENQTTNKGKNNSKPRYKSLEKAIKEFGSQILKEHPTDNQELKNNRLYLYYLQNGKDMYTGQELDIHNLSNYDIDHIVPQSFITDNSIDNLVLTSSAGNREKGDNVPPLEIVQKRKIFWEKLYQGNLMSKRKFDYLTKAERGGLTEADKARFIHRQLVETRQITKNVANILHQRFNYKTDDNEDTMEPVRIVTLKSALVSQFRKQFQLYKVREVNDYHHAHDAYLNGVVANTLLKVYPQLEPEFVYGEYHQFDWFKANKATAKKQFYTNIMLFFAQKERIIDENGEILWDKKYLETIKKVLNYRQMNIVKKTEIQKGEFSNQNPKPRGDSSKLIPKKTNLNPIKYGGFEGSNMAYAIIIEHEKRKKKVTIEKKLIQINIMERKAFEKDEKVFLEGKGYHQPKVLTKLPKYALYECENGRRRMLGSANEVHKGNQMLLPNHLMTLLYHAEKREAIDGESLAYIEAHKAVFGELLAHISEFARKYTLANDKLDEINMLYERNKDGDVKSIAESFVSLKKFNAFGVHKDFNFFGTTIKRKRDRKLKELLNSTIIYQSITGLYESRKRLDS

SEQ ID NO: 246 - protein, 1327 aa, Listeria monocytogenes
MKNPYTIGLDIGTNSVGWAVLTDQYDLVKRKMKVAGNSDKKQIKKNFWGVRLFDDGQTAVDRRMNRTARRRIERRRNRISYLQEIFAVEMANIDANFFCRLNDSFYVDSEKRNSRHPFFATIEEEVAYHKNYRTIYHLREELVNSSEKADLRLVYLALAHIIKYRGNFLIEGALDTKNTSVDGVYEQFIQTYNQVFMSNIEKVEENIEVANILAGKFTRREKFERILQLYPGEKSTGMFAQFISLIVGSKGNFQKVFDLIEKTDIECAKDSYEEDLETLLAIIGDEYAELFVAAKNTYNAVVLSSIITVNDTETNAKLSASMIERFDAHEKDLVELKAFIKLNLPKQYEEIFSNAAIDGYAGYIDGTKQVDFYKYLKTILENIEGSDYFIAKIEEENFLRKQRTFDNGAIPHQLHLEELEAIIHQQAKYYTFLKEDYDKIKSLVTFRIPYFVGPLANGQSEFAWLTRKADGEIRPWNIEEKVDFGKSAVDFIEKMTNKDTYLPKENVLPKHSLCYQKYMVYNELTKVRYIDDQGKTNYFSGQEKQQIFNDLFKQKRKVKKKDLELFLRNINQIESPTIEGLEDSFNASYATYHDLLKVGMKQEILDNPLNTEMLEDIVKILTVFEDKRMIKEQLQQFSDVLDGVVLKKLERRHYTGWGRLSAKLLVGIRDKQSHLTILEYLMDDGLNRNLMQLINDSNLSFKSIIEKEQVSTTDKDLQSIVAELAGSPAIKKGILQSLKIVDELVSIMGYPPQTIVVEMARENQTTGKGKNNSKPRYKSLEKAIKEFGSQILKEHPTDNQELKNNRLYLYYLQNGKDMYTGQELDIHNLSNYDIDHIVPQSFITDNSIDNLVLTSSAGNREKGGDVPPLEIVRKRKVFWEKLYQGNLMSKRKFDYLTKAERGGLTEADKARFIHRQLVETRQITKNVANILHQRFNKETDNHGNTMEQVRIVTLKSALVSQFRKQFQLYKVREVNDYHHAHDAYLNGVVANTLLKVYPQLEPEFVYGEYHQFDWFKANKATAKKQFYTNIMLFFAQKERIIDENGEILWDKKYLETIKKVLDYRQMNIVKKTEIQKGEFSKATIKPKGNSSKLIPRKENWDPMKYGGLDSPNMAYAVIIEHAKGKKRIVIEKKLIQINIMERKMFEKDEEAFLEEKGYRHPKVLTKLPKYTLYECEKGRRRMLASANEAQKGNQLVLSNHLVSLLYHAKNCEASDGKSLKYIEAHRETFSELLAQVSEFATRYTLADANLSKINNLFEQNKEGDIKAIAQSFVDLMAFNAMGAPASFKFFEATIDRKRYTNLKELLSSTIIYQSITGLYESRKRLDD

SEQ ID NO: 247 - protein, 1327 aa, Listeria monocytogenes
MKKPYTIGLDIGTNSVGWAVLTDQYDLVKRKMKISGDSEKKQIKKNFWGVRLFEKGETAAKRRMSRTARRRIERRRNRISYLQEIFAIQMNEVDDNFFNRLKESFYAESDKKYNRHPFFGTVEEEVAYYKDFPTIYHLRKELIDSQKKADLRLVYLALAHIIKYRGHFLIEGALDTKNTSIDEMFKQFLQIYNQVFANDIEKTEKNQEVAQILAEKFTRKDKLDKILSLYPGEKTTGVFAQFVNIIVGSTGKFKKHFNLHEKKDINCAEDTYDTDLESLLAIIGDEFAEVFVAAKNAYNAVVLSNIITVTDSTTRAKLSASLIERFENHKEDLKKMKRFVRTYLPEKYDEIFDDTEKHGYAGYISGTKQADFYKYMKATLEKIEGADYFIAKIEEENFLRKQRTFDNGVIPHQLHLEELEAILHQQAKYYPFLREDYEKIKSLVTFRIPYFVGPLAKGQSEFAWLTRKADGEIRPWNIEEKVDFGKSAVDFIEKMTNKDTYLPKENVLPKHSLCYQKYMVYNELTKVRYIDDQGKTNYFSGQEKQQIFNDLFKQKRKVKKKDLELFLRNINQIESPTIEGLEDSFNASYATYHDLLKVGMKQEILDNPLNTEMLEDIVKILTVFEDKRMIKEQLQQFSDVLDGTVLKKLERRHYTGWGRLSAKLLVGIRDKQSHLTILDYLMDDGLNRNLMQLINDSNLSFKSIIEKEQVSTADKDLQSIVADLAGSPAIKKGILQSLKIVDELVSVMGYPPQTIVVEMARENQTTNKGKNNSKPRYKSLEKAIKEFGSQILKEHPTDNQELKNNRLYLYYLQNGKDMYTGQELDIHNLSNYDIDHIVPQSFITDNSVDNLVLTSSAGNREKGDNVPPLEIVQKRKIFWEKLYQGNLMSKRKFDYLTKAERGGLTEADKARFIHRQLVETRQITKNVANILHQRFNYKTDGNKDTMETVRIVTLKSALVSQFRKQFQFYKVREVNDYHHAHDAYLNGVVANTLLKVYPQLEPEFVYGEYHQFDWFKANKATAKKQFYTNIMLFFAQKDRIIDENGEILWDKRYLETVKKVLGYRQMNIVKKTEIQKGEFSNVTPNPKGKSNKLIPRKKDWDPIKYGGFDGSKMAYAIIIEYEKQKRKVRIEKKLIQINIMEREAFEKDEKTFLEEKGYHQPKVLIKVPKYTLYECENGRRRMLGSANEAHKGNQMLLPNHLMALLYHAEKYEAIDGESLAYIEVHRALFDELLAYISEFARKYTLSNDRLDEINMLYERNKDGDVKSIAESFVSLKKFNAFGVHQDFSFFGTKIERKRDRKLNELLNSTIIYQSITGLYESRKRLDN

SEQ ID NO: 248 - protein, 1327 aa, Listeria monocytogenes
MKNPYTIGLDIGTNSVGWAVLTNQYDLVKRKMKVAGNSDKKQIKKNFWGVRLFDDGQTAVDRRMNRTARRRIERRRNRISYLQEIFAVEMANIDANFFCRLNDSFYVDSEKRNSRHPFFATIEEEVAYHKNYRTIYHLREELVNSSEKADLRLVYLALAHIIKYRGNFLIEGALDTKNTSVDGVYEQFIQTYNQVFMSNIEKVEENIEVANILARKFTRREKFERILQLYPGEKSTGMFAQFISLIVGSKGNFQKVFDLIEKTDIECAKDSYEEDLETLLAIIGDEYAELFVAAKNTYNAVVLSSIITVTDTETNAKLSASMIERFDAHEKDLVELKAFIKLNLPKQYEEIFSNAAIDGYAGYIDGTKQVDFYKYLKTILENIEGADYFIAKIEEENFLRKQRTFDNGAIPHQLHLEELEAIIHQQAKYYPFLREDYEKIKSLVTFRIPYFVGPLAKGQSEFAWLTRKADGEIRPWNIEEKVDFGKSAVDFIEKMTNKDTYLPKENVLPKHSLCYQKYMVYNELTKIRYIDDQGKTNYFSGQEKQQIFNDLFKQKRKVKKKDLELFLRNINHVESPTIEGLEDSFNASYATYHDLMKVGIKQEILDNPLNTEMLEDIVKILTVFEDKRMIKEQLQQFSDVLDGTVLKKLERRHYTGWGRLSAKLLVGIRDKQSHLTILDYLMDDGLNRNLMQLINDSNLSFKSIIEKEQVSTADKDLQSIVADLAGSPAIKKGILQSLKVVEELVSVMGYPPQTIVVEMARENQTTNKGKNNSKPRYKSLEKAIKEFGSQILKEHPTDNQELKNNRLYLYYLQNGKDMYTGQELDIHNLSNYDIDHIVPQSFITDNSIDNLVLTSSAGNREKGDNVPPLEIVQKRKIFWEKLYQGNLMSKRKFDYLTKAERGGLTEADKARFIHRQLVETRQITKNVANILHQRFNYKTDDNEDTMEPVRIVTLKSALVSQFRKQFQLYKVREVNDYHHAHDAYLNGVVANTLLKVYPQLEPEFVYGEYHQFDWFKANKATAKKQFYTNIMLFFAQKERIIDENGEILWDKKYLETIKKVLNYRQMNIVKKTEIQKGEFSNQNPKPRGDSSKLIPKKTNLNPIKYGGFEGSNMAYAIIIEHEKRKKKVTIEKKLIQINIMERKAFEKDEKVFLEGKGYHQPKVLTKLPKYALYECENGRRRMLGSANEVHKGNQMLLPNHLMTLLYHAEKREAIDGESLAYIEAHKAVFGELLAHISEFARKYTLANDKLDEINMLYERNKDGDVKSIAESFVSLKKFNAFGVHKDFNFFGTTIKRKRDRKLKELLNSTIIYQSITGLYESRKRLDS

SEQ ID NO: 249 - protein, 1327 aa, Listeria monocytogenes; identical to SEQ ID NO: 244

SEQ ID NO: 250 - protein, 1327 aa, Listeria monocytogenes; identical to SEQ ID NO: 248

SEQ ID NO: 251 - protein, 781 aa, Listeria monocytogenes
  VARIANT 721: note = X can be any naturally occurring amino acid
  source 1..781: note = FSL F2-208
IFNDLFKQKRKVKKKDLELFLRNINQIESPTIEGLEDSFNASYATYHDLLKVGMKQEILDNPLNTEMLEDIVKILTVFEDKRMIKEQLQQFSDVLDGVVLKKLERRHYTGWGRLSAKLLVGIRDKQSHLTILEYLMDDGLNRNLMQLINDSNLSFKSIIEKEQVSTTDKDLQSIVADLAGSPAIKKGILQSLKIVDELVSIMGYPPQTIVVEMARENQTTVKGKNNSRPRYKSLEKAIKEFGSQILKEHPTDNQELKNNRLYLYYLQNGKDIYTGQELDIHNLSNYDIDHIVPQSFITDNSIDNLVLTSSAGNREKGDDVPPLEIVRKRKVFWEKLYQGNLMSKRKFDYLTKAERGGLTEADKARFIHRQLVETRQITKNVANILHQRFNNETDNHGNTMEQVRIVTLKSALVSQFRKQFQLYKVREVNDYHHAHDAYLNGVVANTLLKVYPQLEPEFVYGEYHQFDWFKANKATAKKQFYTNIMLFFAQKERIIDENGEILWDKKYLETIKKVLDYRQMNIVKKTEIQKGEFSKATIKPKGNSSKLIPRKENWDPMKYGGLDSPNMAYAVIIEHAKGKKKIVIEKKLIQINIMERKMFEKDEEAFLEEKGYRHPKVLTKLPKYTLYECEKGRRRMLASANEAQKGNQLVLSNHLVSLLYHAKNCEASDGKSLKYTEAHRETFSELLAQVSEFATRYTLADANLSKINNLFEQNKEGDIKXIAQSFVDLMVFNAMGAPASFKFFEATIDRKRYTNLKELLSSTIIYQSITGLYESRKRLDD

SEQ ID NO: 252 - protein, 1327 aa, Listeria seeligeri
MKKPYTIGLDIGTNSVGWAALTDQYDLVKRKMKVAGNSEKKQIKKNLWGVRLVDEGKTAAHRRVNRTTRRRIERRRNRISYLQEIFTAEMFEVDANFFYRLEDSFYIESEKRQSRHPFFATIEEEVAYHENYRTIYHLREKLVNSSDKADLRLVYLALAHIIKYRGNFLIEGKLDTKNTSVDEVFKQFIKTYNQVFASDIERIEENNEVAKIFSEKLTKREKLDKILNLYPNEKSTDLFAQFISLIIGSKGNFKKFFNLTEKTDIECAKDSYEEDLEVLLARVGDEYAEIFVAAKNAYNAVVLSSIITVSNTETKAKLSASMIERFDKHDKDLKRMKAFFKVRLPENFNEVFNDVEKDGYAGYIEGTKQEAFYKYMKKMLEHVEGADYFINQIEEENFLRKQRTFDNGAIPHQLHLEELEAILHQQAKYYPFLKVDYEKIKSLVTFRIPYFVGPLANGQSEFSWLTRKADGEIRPWNIEEKVDFGKSAIDFIEKMTNKDTYLPKENVLPKHSMCYQKYMVYNELTKIRYTDDQGKTHYFSGQEKQQIFNDLFKQKRKVKKKDLELFLYNMNHVESPTVEGVEDAFNSSFTTYHDLQKVGVPQEILDDPLNTEMLEEIIKILTVFEDKRMINERLQEFSNVLDEAVLKKLERRHYTGWGRLSAKLLIGIRDKESHLTILDYLMDDKHNRNLMQLINDSNLSFKSIIEKEQVSTADKDIQSIVADLAGSPAIKKGILQSLKIVDELVGIMGYPPQTIVVEMARENQTTGKGKNNSKPRFTSLEKAIKELGSQILKEHPTDNQGLKNDRLYLYYLQNGKDMYTGQELDIHNLSNYDIDHVVPQSFITDNSIDNRVLASSAANREKGDNVPSLEVVRKRKVYWEKLYQAKLMSKRKFDYLTKAERGGLTEADKARFIHRQLVETRQITKNVANILHQRFNCKKDESGNVIEQVRIVTLKAALVSQFRKQFQLYKVREVNDYHHAHDAYLNCVVANTLLKVYPQLEPEFVYGDYHQFDWFKANKATAKKQFYTNIMLFFAKKDRIIDENGEILWDKKYLDTIKKVLNYRQMNIVKKTEIQKGEFSNATANPKGNSSKLIPRKADWDPIKYGGFDGSNMAYAIVIEHEKRKKKTVIKKELIQINIMERTAFEKDQKEFLEGKGYRNPKVITKIPKYTLYECENGRRRMLGSANEAQKGNQMVLPNHLMTLLYHAKNCEASDGKSLAYIESHREMFAELLDSISEFASRYTLADANLEKINTIFEQNKSGDVKVIAQSFVNLLEFNAMGAPASFKYFETNIERKRYNNLKELLNATIIYQSITGLYEARKRLDD

SEQ ID NO: 253 - protein, 1359 aa, synthetic construct; identical to SEQ ID NO: 227
  REGION 1..1359: note = Synthetic polypeptide

SEQ ID NO: 254 - protein, 1290 aa, Roseburia hominis
IVDYCIGLDLGTGSVGWAVVDMNHRLMKRNGKHLWGSRLFSNAETAATRRSSRSIRRRYNKRRERIRLLRAILQDMVLEKDPTFFIRLEHTSFLDEEDKAKYLGDNYNLFIDEDFNDYTYYHKYPTIYHLRKALCESTEKADPRLIYLALHHIVKYRGNFLYEGQKFNMDASNIEDKLSDVFTQFADFNNIPYEDDKKNLEILEILKKPLSKKAKVDEVMALISPEKEFKSAYKELVTGIAGNKMNVTKMILCESIKQGDSEIKLKFSDSNYDDQFSEVENDLGEYVEFIDSLHNIYSWVELQTIMGATHTDNASISEAMVSRYNKHHEDLQLLKKCIKDNVPKKYFDMFRNDSEKVKGYYNYINRKAPVDEFYKFVKKCIEKVDTPEAKQILHDIELENFLLKQNSRTNGSVPYQMQLDEMIKIIDNQAKYYPVLKEKREQLLSILTFRIPYYFGPLETSEHAWIKRLEGKENQRILPWNYQDTVDVDATAEGFIKRMRSYCTYFPDEEVLPKNSLIVSKYEVYNELNKIRVDDKLLEVDVKNDIYNELFMKNKTVTEKKLKNWLVNNQCCRKDAEIKGFQKENQFSTSLTPWIDFTNIFGKIDQSNFDLIEKIIYDLTVFEDKKIMKRRLKKKYALPDDKIKQILKLKYKDWSRLSKKLLDGIVADSVTVLDVLESRLNLMEIINDKELGYAQMIEEASSCPKDGKFTYEEVAKLAGSPALKRGIWQSLQIVEEITKVMKCRPKYIYIEFERSEEKERTESKIKKLENVYKDEQTSVLEELKGFDNTKKISSDSLFLYFTQLGKCMYSGKKLDIDSLDKYQIDHIVPQSLVKDDSFDNRVLVLPSENQRKLDDLVVPFDIRDKMYRFWKLLFDHELISPKKFYSLIKTEYTERDEERFINRQLVETRQITKNVTQIIEDHYSTTKVAAIRANLSHEFRVKNHIYKNRDINDYHHAHDAYIVALIGGFMRDRYPNMHDSKAVYSEYMKMFRNKNDQKGFVINSMNYPYEVDGKLIWNPDLINEIKKCFYYKDCYCTTKLDQKSGQMFNTVLPNDAHSAKGAVIPVNKNRKDVNKYGGFSGLQYVIAAIEGTKKKGKKLVKVRKLSGIPLYLKQADIKEQIEYVEKEEKLSDVKIIKNNIPLNQLIEIDGRQYLLTSECVNAMQLVLNEEQCKLIADIYNAIYKQDFDGLDNMLMIQLYLQLIDKLKTLYPIYMGIVEKFEKFVSISKEEKANVIQMLIIMHKGPQNGNIIYDDFNVGKRIGRLNGRTFYLNIEFISQSPTGIYTKKYKL

SEQ ID NO: 255 - protein, 1292 aa, Sharpea azabuensis
KDIRYSIGLDIGTNSVGWAVMDEHYELLKKGNHHMWGSRLFDAAEPAATRRASRSIRRRYNKRRERIRLLRDLLGDMVMEVDPTFFIRLLNVSFLDEEDKQKNLGDNYNLFIEKDFNDKTYYDKYPTIYHLRKELCENKEKADPRLIYLALHHIVKYRGNFLYEGQSFTMDNSDIEERLNSAIEKFMSINEFDNRIVSDINSMIAVLSKIYQRSKKADDLLKIMNPTKEEKAAYKEFTKALVGLKFNISKMILAQEVKKGDTDIVLEFSNANYDSTIDELQSELGEYIEFIEMLHNIYSWVELQAILGATHTDNPSISAAMVERYEEHKKDLRVLKKVIREELPDKYNEVFRKDNRKLHNYLGYIKYDTPVEEFYKYIKGLLAKVDTDEAREILERIDLEKFMLKQNSRTNGSIPYQMQKDEMIQIIDNQSVYYPQLKENRDKLISILEFRIPYYFGPLAHSEFAWIKKFEDKQKERILPWNYDQIVDIDATAEGFIERMKNTGTYFPDEPVMAKNSLTVSKFEVLNELNKIRINGKLIAVETKKELLSDLFMKNKTITDKKLKDWLVTHQYYDINEELKIEGYQKDLQFSTSLAPWIDFTKIFGEINASNYQLIEKIIYDISIFEDKKILKRRLKKVYQLDDLLVDKILKLNYTGWSRLSEKLLTGMTADKATVLFVLESNKNLMEIINDEKLGYKQIIEESNMQDIEGPFKYDEVKKLAGSPAIKRGIWQALLVVREITKFMKHEPSHIYIEFAREEQKVRKESKIAKLQKIYENLQTQVYESLKKEDAKKRMETDALYLYYLQMGKSMYSGKPLDIDKLSTYQIDHILPQSLIKDDSFDNRVLVLPEENQWKLDSETVPFEIRNKMIGFWQMLHENGLMSNKKFFSLIRTDFSDKDKERFINRQLVETRQIIKNVAVIINDHYTNTNIVTVRAELSHQFRERYKIYKNRDINDFHHAHDAYIACIVGQFMHQNFEHLDAKIIYGQYKKNYKKNYGFILNSMNHLQSDIDTGEVMWDPAKIGKIKSCFYYKDVYVTKKLEQNSGTLFNTVLPNDAHSEKGATVPLNKYRADVHKYGGFGNVQSIIVAIEGKKKKGKKLIDVRKLTSIPLHLKNAPVEEQLSYIASPEHEDLIDVRIVKEILKNQLIEIDGGLYYVTSEYVTARQLSLNEQSCKLISEIYAAMLKKRYEYLDEEEIFDLYLQLLQKMDTLYPAYKGIAKRFFDFKNIDVVEKCDVIQILIIMHAGPMNGNIMYDDFKFTNRIGRFTHKNIDLKTTFISTSVTGLFSKKYKL

SEQ ID NO: 256 - protein, 1359 aa, synthetic construct; identical to SEQ ID NO: 227
  REGION 1..1359: note = Synthetic polypeptide

SEQ ID NO: 257 - protein, 1359 aa, synthetic construct
  REGION 1..1359: note = Synthetic polypeptide
MDKKYSIGLAIGTNSVGWAVITDEYKVPSKKFKVLGNTDRHSIKKNLIGALLFDSGETAEATRLKRTARRRYTRRKNRICYLQEIFSNEMAKVDDSFFHRLEESFLVEEDKKHERHPIFGNIVDEVAYHEKYPTIYHLRKKLVDSTDKADLRLIYLALAHMIKFRGHFLIEGDLNPDNSDVDKLFIQLVQTYNQLFEENINASGVDAKAILSARLSKSRRLENLIAQLPGEKKNGLFGNLIALSLGLTPNFKSNFDLAEDAKLQLSKDTYDDDLDNLLAQIGDQYADLFLAAKNLSDAILLSDILRVNTEITKAPLSASMIKRYDEHHQDLTLLKALVRQQLPEKYKEIFFDQSKNGYAGYIDGGASQEEFYKFIKPILEKMDGTEELLVKLNREDLLRKQRTFDNGSIPHQIHLGELHAILRRQEDFYPFLKDNREKIEKILTFRIPYYVGPLARGNSRFAWMTRKSEETITPWNFEEVVDKGASAQSFIERMTNFDKNLPNEKVLPKHSLLYEYFTVYNELTKVKYVTEGMRKPAFLSGEQKKAIVDLLFKTNRKVTVKQLKEDYFKKIECFDSVEISGVEDRFNASLGTYHDLLKIIKDKDFLDNEENEDILEDIVLTLTLFEDREMIEERLKTYAHLFDDKVMKQLKRRRYTGWGRLSRKLINGIRDKQSGKTILDFLKDGFANRNFMQLIHDDSLTFKEDIQKAQVSGQGDSLHEHIANLAGSPAIKKGILQTVKVVDELVKVMGRHKPENIVIEMARENQTTQKGQKNSRERMKRIEEGIKELGSQILKEHPVENTQLQNEKLYLYYLQNGRDMYVDQELDINRLSDYDVDAIVPQSFLKDDSIDNKVLTRSDKNRGKSDNVPSEEVVKKMKNYWRQLLNAKLITQRKFDNLTKAERGGLSELDKAGFIKRQLVETRQITKHVAQILDSRMNTKYDENDKLIREVKVITLKSKLVSDFRKDFQFYKVREINNYHHAHDAYLNAVVGTALIKKYPKLESEFVYGDYKVYDVSEQEIGKATAKYFFYSNIMNFFKTEITLANGEIRKRPLIETNGETGEIVWDKGRDFATVRKVLSMPQVNIVKKTEVQTGGFSKESILPKRNSDKLIARKKDWDPKKYGGFDSPTVAYSVLVVAKVEKGKSKKLKSVKELLGITIMERSSFEKNPIDFLEAKGYKEVKKDLIIKLPKYSLFELENGRKRMLASGELQKGNELALPSKYVNFLYLASHYEKLKGSPEDNEQKQLFVEQHKHYLDEIIEQISEFSKRVILADANLDKVLSAYNKHRDKPIREQAENIIHLFTLTNLGAPAAFKYFDTTIDRKRYTSTKEVLDATLIHQSITGLYETRIDLSQLGGD

SEQ ID NO: 258 - protein, 1359 aa, synthetic construct; identical to SEQ ID NO: 10
  REGION 1..1359: note = Synthetic polypeptide

SEQ ID NO: 259 - protein, 1359 aa, synthetic construct; identical to SEQ ID NO: 257
  REGION 1..1359: note = Synthetic polypeptide

SEQ ID NO: 260 - protein, 1388 aa, Streptococcus thermophilus
MTKPYSIGLDIGTNSVGWAVITDNYKVPSKKMKVLGNTSKKYIKKNLLGVLLFDSGITAEGRRLKRTARRRYTRRRNRILYLQEIFSTEMATLDDAFFQRLDDSFLVPDDKRDSKYPIFGNLVEEKAYHDEFPTIYHLRKYLADSTKKADLRLVYLALAHMIKYRGHFLIEGEFNSKNNDIQKNFQDFLDTYNAIFESDLSLENSKQLEEIVKDKISKLEKKDRILKLFPGEKNSGIFSEFLKLIVGNQADFRKCFNLDEKASLHFSKESYDEDLETLLGYIGDDYSDVFLKAKKLYDAILLSGFLTVTDNETEAPLSSAMIKRYNEHKEDLALLKEYIRNISLKTYNEVFKDDTKNGYAGYIDGKTNQEDFYVYLKNLLAEFEGADYFLEKIDREDFLRKQRTFDNGSIPYQIHLQEMRAILDKQAKFYPFLAKNKERIEKILTFRIPYYVGPLARGNSDFAWSIRKRNEKITPWNFEDVIDKESSAEAFINRMTSFDLYLPEEKVLPKHSLLYETFNVYNELTKVRFIAESMRDYQFLDSKQKKDIVRLYFKDKRKVTDKDIIEYLHAIYGYDGIELKGIEKQFNSSLSTYHDLLNIINDKEFLDDSSNEAIIEEIIHTLTIFEDREMIKQRLSKFENIFDKSVLKKLSRRHYTGWGKLSAKLINGIRDEKSGNTILDYLIDDGISNRNFMQLIHDDALSFKKKIQKAQIIGDEDKGNIKEVVKSLPGSPAIKKGILQSIKIVDELVKVMGGRKPESIVVEMARENQYTNQGKSNSQQRLKRLEKSLKELGSKILKENIPAKLSKIDNNALQNDRLYLYYLQNGKDMYTGDDLDIDRLSNYDIDHIIPQAFLKDNSIDNKVLVSSASNRGKSDDFPSLEVVKKRKTFWYQLLKSKLISQRKFDNLTKAERGGLLPEDKAGFIQRQLVETRQITKHVARLLDEKFNNKKDENNRAVRTVKIITLKSTLVSQFRKDFELYKVREINDFHHAHDAYLNAVIASALLKKYPKLEPEFVYGDYPKYNSFRERKSATEKVYFYSNIMNIFKKSISLADGRVIERPLIEVNEETGESVWNKESDLATVRRVLSYPQVNVVKKVEEQNHGLDRGKPKGLFNANLSSKPKPNSNENLVGAKEYLDPKKYGGYAGISNSFAVLVKGTIEKGAKKKITNVLEFQGISILDRINYRKDKLNFLLEKGYKDIELIIELPKYSLFELSDGSRRMLASILSTNNKRGEIHKGNQIFLSQKFVKLLYHAKRISNTINENHRKYVENHKKEFEELFYYILEFNENYVGAKKNGKLLNSAFQSWQNHSIDELCSSFIGPTGSERKGLFELTSRGSAADFEFLGVKIPRYRDYTPSSLLKDATLIHQSVTGLYETRIDLAKLGEG

SEQ ID NO: 261 - protein, 1056 aa, Staphylococcus aureus
GSHMKRNYILGLDIGITSVGYGIIDYETRDVIDAGVRLFKEANVENNEGRRSKRGARRLKRRRRHRIQRVKKLLFDYNLLTDHSELSGINPYEARVKGLSQKLSEEEFSAALLHLAKRRGVHNVNEVEEDTGNELSTKEQISRNSKALEEKYVAELQLERLKKDGEVRGSINRFKTSDYVKEAKQLLKVQKAYHQLDQSFIDTYIDLLETRRTYYEGPGEGSPFGWKDIKEWYEMLMGHCTYFPEELRSVKYAYNADLYNALNDLNNLVITRDENEKLEYYEKFQIIENVFKQKKKPTLKQIAKEILVNEEDIKGYRVTSTGKPEFTNLKVYHDIKDITARKEIIENAELLDQIAKILTIYQSSEDIQEELTNLNSELTQEEIEQISNLKGYTGTHNLSLKAINLILDELWHTNDNQIAIFNRLKLVPKKVDLSQQKEIPTTLVDDFILSPVVKRSFIQSIKVINAIIKKYGLPNDIIIELAREKNSKDAQKMINEMQKRNRQTNERIEEIIRTTGKENAKYLIEKIKLHDMQEGKCLYSLEAIPLEDLLNNPFNYEVDHIIPRSVSFDNSFNNKVLVKQEEASKKGNRTPFQYLSSSDSKISYETFKKHILNLAKGKGRISKTKKEYLLEERDINRFSVQKDFINRNLVDTRYATRGLMNLLRSYFRVNNLDVKVKSINGGFTSFLRRKWKFKKERNKGYKHHAEDALIIANADFIFKEWKKLDKAKKVMENQMFEEKQAESMPEIETEQEYKEIFITPHQIKHIKDFKDYKYSHRVDKKPNRELINDTLYSTRKDDKGNTLIVNNLNGLYDKDNDKLKKLINKSPEKLLMYHHDPQTYQKLKLIMEQYGDEKNPLYKYYEETGNYLTKYSKKDNGPVIKKIKYYGNKLNAHLDITDDYPNSRNKVVKLSLKPYRFDVYLDNGVYKFVTVKNLDVIKKENYYEVNSKAYEEAKKLKKISNQAEFIASFYNNDLIKINGELYRVIGVNNDLLNRIEVNMIDITYREYLENMNDKRPPRIIKTIASKTQSIKKYSTDILGNLYEVKSKKHPQIIKKG

SEQ ID NO: 262 - protein, 1368 aa, synthetic construct; identical to SEQ ID NO: 8
  REGION 1..1368: note = Synthetic polypeptide

SEQ ID NO: 263 - protein, 198 aa, Homo sapiens [sequence omitted]

SEQ ID NO: 264 - protein, 198 aa, Mus musculus
MDSLLMKQKKFLYHFKNVRWAKGRHETYLCYVVKRRDSATSCSLDFGHLRNKSGCHVELLFLRYISDWDLDPGRCYRVTWFTSWSPCYDCARHVAEFLRWNPNLSLRIFTARLYFCEDRKAEPEGLRRLHRAGVQIGIMTFKDYFYCWNTFVENRERTFKAWEGLHENSVRLTRQLRRILLPLYEVDDLRDAFRMLGF

SEQ ID NO: 265 - protein, 198 aa, Canis lupus
MDSLLMKQRKFLYHFKNVRWAKGRHETYLCYVVKRRDSATSFSLDFGHLRNKSGCHVELLFLRYISDWDLDPGRCYRVTWFTSWSPCYDCARHVADFLRGYPNLSLRIFAARLYFCEDRKAEPEGLRRLHRAGVQIAIMTFKDYFYCWNTFVENREKTFKAWEGLHENSVRLSRQLRRILLPLYEVDDLRDAFRTLGL

SEQ ID NO: 266 - protein, 199 aa, Bos taurus
MDSLLKKQRQFLYQFKNVRWAKGRHETYLCYVVKRRDSPTSFSLDFGHLRNKAGCHVELLFLRYISDWDLDPGRCYRVTWFTSWSPCYDCARHVADFLRGYPNLSLRIFTARLYFCDKERKAEPEGLRRLHRAGVQIAIMTFKDYFYCWNTFVENHERTFKAWEGLHENSVRLSRQLRRILLPLYEVDDLRDAFRTLGL

SEQ ID NO: 267 - protein, 429 aa, Mus musculus
MGPFCLGCSHRKCYSPIRNLISQETFKFHFKNLGYAKGRKDTFLCYEVTRKDCDSPVSLHHGVFKNKDNIHAEICFLYWFHDKVLKVLSPREEFKITWYMSWSPCFECAEQIVRFLATHHNLSLDIFSSRLYNVQDPETQQNLCRLVQEGAQVAAMDLYEFKKCWKKFVDNGGRRFRPWKRLLTNFRYQDSKLQEILRPCYIPVPSSSSSTLSNICLTKGLPETRFCVEGRRMDPLSEEEFYSQFYNQRVKHLCYYHRMKPYLCYQLEQFNGQAPLKGCLLSEKGKQHAEILFLDKIRSMELSQVTITCYLTWSPCPNCAWQLAAFKRDRPDLILHIYTSRLYFHWKRPFQKGLCSLWQSGILVDVMDLPQFTDCWTNFVNPKRPFWPWKGLEIISRRTQRRLRRIKESWGLQDLVNDFGNLQLGPPMS

SEQ ID NO: 268 - protein, 429 aa, Rattus rattus
MGPFCLGCSHRKCYSPIRNLISQETFKFHFKNLRYAIDRKDTFLCYEVTRKDCDSPVSLHHGVFKNKDNIHAEICFLYWFHDKVLKVLSPREEFKITWYMSWSPCFECAEQVLRFLATHHNLSLDIFSSRLYNIRDPENQQNLCRLVQEGAQVAAMDLYEFKKCWKKFVDNGGRRFRPWKKLLTNFRYQDSKLQEILRPCYIPVPSSSSSTLSNICLTKGLPETRFCVERRRVHLLSEEEFYSQFYNQRVKHLCYYHGVKPYLCYQLEQFNGQAPLKGCLLSEKGKQHAEILFLDKIRSMELSQVIITCYLTWSPCPNCAWQLAAFKRDRPDLILHIYTSRLYFHWKRPFQKGLCSLWQSGILVDVMDLPQFTDCWTNFVNPKRPFWPWKGLEIISRRTQRRLHRIKESWGLQDLVNDFGNLQLGPPMS

SEQ ID NO: 269 - protein, 370 aa, Macaca mulatta
MVEPMDPRTFVSNFNNRPILSGLNTVWLCCEVKTKDPSGPPLDAKIFQGKVYSKAKYHPEMRFLRWFHKWRQLHHDQEYKVTWYVSWSPCTRCANSVATFLAKDPKVTLTIFVARLYYFWKPDYQQALRILCQKRGGPHATMKIMNYNEFQDCWNKFVDGRGKPFKPRNNLPKHYTLLQATLGELLRHLMDPGTFTSNFNNKPWVSGQHETYLCYKVERLHNDTWVPLNQHRGFLRNQAPNIHGFPKGRHAELCFLDLIPFWKLDGQQYRVTCFTSWSPCFSCAQEMAKFISNNEHVSLCIFAARIYDDQGRYQEGLRALHRDGAKIAMMNYSEFEYCWDTFVDRQGRPFQPWDGLDEHSQALSGRLRAI

SEQ ID NO: 270 - protein, 384 aa, Pan troglodytes
MKPHFRNPVERMYQDTFSDNFYNRPILSHRNTVWLCYEVKTKGPSRPPLDAKIFRGQVYSKLKYHPEMRFFHWFSKWRKLHRDQEYEVTWYISWSPCTKCTRDVATFLAEDPKVTLTIFVARLYYFWDPDYQEALRSLCQKRDGPRATMKIMNYDEFQHCWSKFVYSQRELFEPWNNLPKYYILLHIMLGEILRHSMDPPTFTSNFNNELWVRGRHETYLCYEVERLHNDTWVLLNQRRGFLCNQAPHKHGFLEGRHAELCFLDVIPFWKLDLHQDYRVTCFTSWSPCFSCAQEMAKFISNNKHVSLCIFAARIYDDQGRCQEGLRTLAKAGAKISIMTYSEFKHCWDTFVDHQGCPFQPWDGLEEHSQALSGRLRAILQNQGN

SEQ ID NO: 271 - protein, 377 aa, Chlorocebus sabaeus
MNPQIRNMVEQMEPDIFVYYFNNRPILSGRNTVWLCYEVKTKDPSGPPLDANIFQGKLYPEAKDHPEMKFLHWFRKWRQLHRDQEYEVTWYVSWSPCTRCANSVATFLAEDPKVTLTIFVARLYYFWKPDYQQALRILCQERGGPHATMKIMNYNEFQHCWNEFVDGQGKPFKPRKNLPKHYTLLHATLGELLRHVMDPGTFTSNFNNKPWVSGQRETYLCYKVERSHNDTWVLLNQHRGFLRNQAPDRHGFPKGRHAELCFLDLIPFWKLDDQQYRVTCFTSWSPCFSCAQKMAKFISNNKHVSLCIFAARIYDDQGRCQEGLRTLHRDGAKIAVMNYSEFEYCWDTFVDRQGRPFQPWDGLDEHSQALSGRLRAI

SEQ ID NO: 272 - protein, 384 aa, Homo sapiens
MKPHFRNTVERMYRDTFSYNFYNRPILSRRNTVWLCYEVKTKGPSRPPLDAKIFRGQVYSELKYHPEMRFFHWFSKWRKLHRDQEYEVTWYISWSPCTKCTRDMATFLAEDPKVTLTIFVARLYYFWDPDYQEALRSLCQKRDGPRATMKIMNYDEFQHCWSKFVYSQRELFEPWNNLPKYYILLHIMLGEILRHSMDPPTFTFNFNNEPWVRGRHETYLCYEVERMHNDTWVLLNQRRGFLCNQAPHKHGFLEGRHAELCFLDVIPFWKLDLDQDYRVTCFTSWSPCFSCAQEMAKFISKNKHVSLCIFTARIYDDQGRCQEGLRTLAEAGAKISIMTYSEFKHCWDTFVDHQGCPFQPWDGLDEHSQDLSGRLRAILQNQEN

SEQ ID NO: 273 - protein, 373 aa, Homo sapiens
MKPHFRNTVERMYRDTFSYNFYNRPILSRRNTVWLCYEVKTKGPSRPRLDAKIFRGQVYSQPEHHAEMCFLSWFCGNQLPAYKCFQITWFVSWTPCPDCVAKLAEFLAEHPNVTLTISAARLYYYWERDYRRALCRLSQAGARVKIMDDEEFAYCWENFVYSEGQPFMPWYKFDDNYAFLHRTLKEILRNPMEAMYPHIFYFHFKNLRKAYGRNESWLCFTMEVVKHHSPVSWKRGVFRNQVDPETHCHAERCFLSWFCDDILSPNTNYEVTWYTSWSPCPECAGEVAEFLARHSNVNLTIFTARLYYFWDTDYQEGLRSLSQEGASVEIMGYKDFKYCWENFVYNDDEPFKPWKGLKYNFLFLDSKLQEILE

SEQ ID NO: 274 - protein, 382 aa, Homo sapiens
MNPQIRNPMERMYRDTFYDNFENEPILYGRSYTWLCYEVKIKRGRSNLLWDTGVFRGQVYFKPQYHAEMCFLSWFCGNQLPAYKCFQITWFVSWTPCPDCVAKLAEFLSEHPNVTLTISAARLYYYWERDYRRALCRLSQAGARVTIMDYEEFAYCWENFVYNEGQQFMPWYKFDENYAFLHRTLKEILRYLMDPDTFTFNFNNDPLVLRRRQTYLCYEVERLDNGTWVLMDQHMGFLCNEAKNLLCGFYGRHAELRFLDLVPSLQLDPAQIYRVTWFISWSPCFSWGCAGEVRAFLQENTHVRLRIFAARIYDYDPLYKEALQMLRDAGAQVSIMTYDEFEYCWDTFVYRQGCPFQPWDGLEEHSQALSGRLRAILQNQGN

SEQ ID NO: 275 - protein, 190 aa, Homo sapiens
MNPQIRNPMKAMYPGTFYFQFKNLWEANDRNETWLCFTVEGIKRRSVVSWKTGVFRNQVDSETHCHAERCFLSWFCDDILSPNTKYQVTWYTSWSPCPDCAGEVAEFLARHSNVNLTIFTARLYYFQYPCYQEGLRSLSQEGVAVEIMDYEDFKYCWENFVYNDNEPFKPWKGLKTNFRLLKRRLRESLQ

SEQ ID NO: 276 - protein, 199 aa, Homo sapiens
MEASPASGPRHLMDPHIFTSNFNNGIGRHKTYLCYEVERLDNGTSVKMDQHRGFLHNQAKNLLCGFYGRHAELRFLDLVPSLQLDPAQIYRVTWFISWSPCFSWGCAGEVRAFLQENTHVRLRIFAARIYDYDPLYKEALQMLRDAGAQVSIMTYDEFKHCWDTFVDHQGCPFQPWDGLDEHSQALSGRLRAILQNQGN

SEQ ID NO: 277 - protein, 200 aa, Homo sapiens
MALLTAETFRLQFNNKRRLRRPYYPRKALLCYQLTPQNGSTPTRGYFENKKKCHAEICFINEIKSMGLDETQCYQVTCYLTWSPCSSCAWELVDFIKAHDHLNLGIFASRLYYHWCKPQQKGLRLLCGSQVPVEVMGFPKFADCWENFVDHEKPLSFNPYKMLEELDKNSRAIKRRLERIKIPGVRAQGRYMDILCDAEV

SEQ ID NO: 278 - protein, 386 aa, Homo sapiens
MNPQIRNPMERMYRDTFYDNFENEPILYGRSYTWLCYEVKIKRGRSNLLWDTGVFRGPVLPKRQSNHRQEVYFRFENHAEMCFLSWFCGNRLPANRRFQITWFVSWNPCLPCVVKVTKFLAEHPNVTLTISAARLYYYRDRDWRWVLLRLHKAGARVKIMDYEDFAYCWENFVCNEGQPFMPWYKFDDNYASLHRTLKEILRNPMEAMYPHIFYFHFKNLLKACGRNESWLCFTMEVTKHHSAVFRKRGVFRNQVDPETHCHAERCFLSWFCDDILSPNTNYEVTWYTSWSPCPECAGEVAEFLARHSNVNLTIFTARLCYFWDTDYQEGLCSLSQEGASVKIMGYKDFVSCWKNFVYSDDEPFKPWKGLQTNFRLLKRRLREILQ

SEQ ID NO: 279 - protein, 236 aa, Homo sapiens
MTSEKGPSTGDPTLRRRIEPWEFDVFYDPRELRKEACLLYEIKWGMSRKIWRSSGKNTTNHVEVNFIKKFTSERDFHPSMSCSITWFLSWSPCWECSQAIREFLSRHPGVTLVIYVARLFWHMDQQNRQGLRDLVNSGVTIQIMRASEYYHCWRNFVNYPPGDEAHWPQYPPLWMMLYALELHCIILSLPPCLKISRRWQNHLTFFRLHLQNCHYQTIPPHILLATGLIHPSVAWR

SEQ ID NO: 280 - protein, 229 aa, Mus musculus
MSSETGPVAVDPTLRRRIEPHEFEVFFDPRELRKETCLLYEINWGGRHSVWRHTSQNTSNHVEVNFLEKFTTERYFRPNTRCSITWFLSWSPCGECSRAITEFLSRHPYVTLFIYIARLYHHTDQRNRQGLRDLISSGVTIQIMTEQEYCYCWRNFVNYPPSNEAYWPRYPHLWVKLYVLELYCIILGLPPCLKILRRKQPQLTFFTITLQTCHYQRIPPHLLWATGLK

SEQ ID NO: 281 - protein, 229 aa, Rattus rattus [sequence omitted]

SEQ ID NO: 282 - DNA, 4107 bp, Streptococcus pyogenes
  source 1..4107: mol_type = genomic DNA
atggataagaaatactcaataggcttagatatcggcacaaatagcgtcggatgggcggtgatcactgatgaatataaggttccgtctaaaaagttcaaggttctgggaaatacagaccgccacagtatcaaaaaaaatcttataggggctcttttatttgacagtggagagacagcggaagcgactcgtctcaaacggacagctcgtagaaggtatacacgtcggaagaatcgtatttgttatctacaggagattttttcaaatgagatggcgaaagtagatgatagtttctttcatcgacttgaagagtcttttttggtggaagaagacaagaagcatgaacgtcatcctatttttggaaatatagtagatgaagttgcttatcatgagaaatatccaactatctatcatctgcgaaaaaaattggtagattctactgataaagcggatttgcgcttaatctatttggccttagcgcatatgattaagtttcgtggtcattttttgattgagggagatttaaatcctgataatagtgatgtggacaaactatttatccagttggtacaaacctacaatcaattatttgaagaaaaccctattaacgcaagtggagtagatgctaaagcgattctttctgcacgattgagtaaatcaagacgattagaaaatctcattgctcagctccccggtgagaagaaaaatggcttatttgggaatctcattgctttgtcattgggtttgacccctaattttaaatcaaattttgatttggcagaagatgctaaattacagctttcaaaagatacttacgatgatgatttagataatttattggcgcaaattggagatcaatatgctgatttgtttttggcagctaagaatttatcagatgctattttactttcagatatcctaagagtaaatactgaaataactaaggctcccctatcagcttcaatgattaaacgctacgatgaacatcatcaagacttgactcttttaaaagctttagttcgacaacaacttccagaaaagtataaagaaatcttttttgatcaatcaaaaaacggatatgcaggttatattgatgggggagctagccaagaagaattttataaatttatcaaaccaattttagaaaaaatggatggtactgaggaattattggtgaaactaaatcgtgaagatttgctgcgcaagcaacggacctttgacaacggctctattccccatcaaattcacttgggtgagctgcatgctattttgagaagacaagaagacttttatccatttttaaaagacaatcgtgagaagattgaaaaaatcttgacttttcgaattccttattatgttggtccattggcgcgtggcaatagtcgttttgcatggatgactcggaagtctgaagaaacaattaccccatggaattttgaagaagttgtcgataaaggtgcttcagctcaatcatttattgaacgcatgacaaactttgataaaaatcttccaaatgaaaaagtactaccaaaacatagtttgctttatgagtattttacggtttataacgaattgacaaaggtcaaatatgttactgaaggaatgcgaaaaccagcatttctttcaggtgaacagaagaaagccattgttgatttactcttcaaaacaaatcgaaaagtaaccgttaagcaattaaaagaagattatttcaaaaaaatagaatgttttgatagtgttgaaatttcaggagttgaagatagatttaatgcttcattaggtacctaccatgatttgctaaaaattattaaagataaagattttttggataatgaagaaaatgaagatatcttagaggatattgttttaacattgaccttatttgaagatagggagatgattgaggaaagacttaaaacatatgctcacctctttgatgataaggtgatgaaacagcttaaacgtcgccgttatactggttggggacgtttgtctcgaaaattgattaatggtattagggataagcaatctggcaaaacaatattagattttttgaaatcagatggttttgccaatcgcaattttatgcagctgatccatgatgatagtttgacatttaaagaagacattcaaaaagcacaagtgtctggacaaggcgatagtttacatgaacatattgcaaatttagctggtagccctgctattaaaaaaggtattttacagactgtaaaagttgttgatgaattggtcaaagtaatggggcggcataagccagaaaatatcgttattgaaatggcacgtgaaaatcagacaactcaaaagggccagaaaaattcgcgagagcgtatgaaacgaatcgaagaaggtatcaaagaattaggaagtcagattcttaaagagcatcctgttgaaaatactcaattgcaaaatgaaaagctctatctctattatctccaaaatggaagagacatgtatgtggaccaagaattagatattaatcgtttaagtgattatgatgtcgatcacattgttccacaaagtttccttaaagacgattcaatagacaataaggtcttaacgcgttctgataaaaatcgtggtaaatcggataacgttccaagtgaagaagtagtcaaaaagatgaaaaactattggagacaacttctaaacgccaagttaatcactcaacgtaagtttgataatttaacgaaagctgaacgtggaggtttgagtgaacttgataaagctggttttatcaaacgccaattggttgaaactcgccaaatcactaagcatgtggcacaaattttggatagtcgcatgaatactaaatacgatgaaaatgataaacttattcgagaggttaaagtgattaccttaaaatctaaattagtttctgacttccgaaaagatttccaattctataaagtacgtgagattaacaattaccatcatgcccatgatgcgtatctaaatgccgtcgttggaactgctttgattaagaaatatccaaaacttgaatcggagtttgtctatggtgattataaagtttatgatgttcgtaaaatgattgctaagtctgagcaagaaataggcaaagcaaccgcaaaatatttcttttactctaatatcatgaacttcttcaaaacagaaattacacttgcaaatggagagattcgcaaacgccctctaatcgaaactaatggggaaactggagaaattgtctgggataaagggcgagattttgccacagtgcgcaaagtattgtccatgccccaagtcaatattgtcaagaaaacagaagtacagacaggcggattctccaaggagtcaattttaccaaaaagaaattcggacaagcttattgctcgtaaaaaagactgggatccaaaaaaatatggtggttttgatagtccaacggtagcttattcagtcctagtggttgctaaggtggaaaaagggaaatcgaagaagttaaaatccgttaaagagttactagggatcacaattatggaaagaagttcctttgaaaaaaatccgattgactttttagaagctaaaggatataaggaagttaaaaaagacttaatcattaaactacctaaatatagtctttttgagttagaaaacggtcgtaaacggatgctggctagtgccggagaattacaaaaaggaaatgagctggctctgccaagcaaatatgtgaattttttatatttagctagtcattatgaaaagttgaagggtagtccagaagataacgaacaaaaacaattgtttgtggagcagcataagcattatttagatgagattattgagcaaatcagtgaattttctaagcgtgttattttagcagatgccaatttagataaagttcttagtgcatataacaaacatagagacaaaccaatacgtgaacaagcagaaaatattattcatttatttacgttgacgaatcttggagctcccgctgcttttaaatattttgatacaacaattgatcgtaaacgatatacgtctacaaaagaagttttagatgccactcttatccatcaatccatcactggtctttatgaaacacgcattgatttgagtcagctaggaggtgactga

SEQ ID NO: 283 - protein, 36 aa, synthetic construct
  REGION 1..36: note = Synthetic polypeptide
  VARIANT 2: note = X can be any naturally occurring amino acid
  VARIANT 4..23: note = X can be any naturally occurring amino acid
  VARIANT 24..26: note = X can be any naturally occurring amino acid
  VARIANT 27..29: note = X can be any naturally occurring amino acid
  VARIANT 32: note = X can be any naturally occurring amino acid
  VARIANT 33..35: note = X can be any naturally occurring amino acid
HXEXXXXXXXXXXXXXXXXXXXXXXXXXXPCXXXXC

SEQ ID NO: 284 - protein, 11 aa, synthetic construct
  REGION 1..11: note = Synthetic polypeptide
SPKKKRKVEAS

SEQ ID NO: 285 - RNA, 82 nt, synthetic construct
  misc_feature 1..82: note = Synthetic polynucleotide
  source 1..82: mol_type = other RNA
gttttagagctagaaatagcaagttaaaataaaggctagtccgttatcaacttgaaaaagtggcaccgagtcggtgcttttt

SEQ ID NO: 286 - DNA, 20 bp, synthetic construct
  misc_feature 1..20: note = Synthetic polynucleotide
  source 1..20: mol_type = other DNA
aagagagacagtacatgccc

SEQ ID NO: 287 - DNA, 20 bp, synthetic construct
  misc_feature 1..20: note = Synthetic polynucleotide
  source 1..20: mol_type = other DNA
ggagcccaccgagtacctgg

SEQ ID NO: 288 - DNA, 20 bp, synthetic construct
  misc_feature 1..20: note = Synthetic polynucleotide
  source 1..20: mol_type = other DNA
agtctcctcagcaaaacgaa

SEQ ID NO: 289 - DNA, 20 bp, synthetic construct
  misc_feature 1..20: note = Synthetic polynucleotide
  source 1..20: mol_type = other DNA
gaccccctccaccccgcctc

SEQ ID NO: 290 - DNA, 23 bp, synthetic construct
  misc_feature 1..23: note = Synthetic polynucleotide
  misc_difference 21..23: note = n is a, c, g, or t
  source 1..23: mol_type = other DNA
aagagagacagtacatgcccnnn

SEQ ID NO: 291 - DNA, 23 bp, synthetic construct
  misc_feature 1..23: note = Synthetic polynucleotide
  misc_difference 21: note = n is a, c, g, or t
  source 1..23: mol_type = other DNA
aagagagacagtacatgcccngg

SEQ ID NO: 292 - DNA, 189 bp, synthetic construct
  misc_feature 1..189: note = Synthetic polynucleotide
  source 1..189: mol_type = other DNA
gaggccagcggttccggacgggctgacgcattggacgattttgatctggatatgctgggaagtgacgccctcgatgattttgaccttgacatgcttggttcggatgcccttgatgactttgacctcgacatgctcggcagtgacgcccttgatgatttcgacctggacatgctgattaactctagatag

SEQ ID NO: 293 - protein, 62 aa, synthetic construct
  REGION 1..62: note = Synthetic polypeptide
EASGSGRADALDDFDLDMLGSDALDDFDLDMLGSDALDDFDLDMLGSDALDDFDLDMLINSR

SEQ ID NO: 294 - DNA, 1662 bp, synthetic construct
  misc_feature 1..1662: note = Synthetic polynucleotide
  source 1..1662: mol_type = other DNA
tcgccagggatccgtcgacttgacgcgttgatatcaacaagtttgtacaaaaaagcaggctacaaagaggccagcggttccggacgggctgacgcattggacgattttgatctggatatgctgggaagtgacgccctcgatgattttgaccttgacatgcttggttcggatgcccttgatgactttgacctcgacatgctcggcagtgacgcccttgatgatttcgacctggacatgctgattaactctagaagttccggatctccgaaaaagaaacgcaaagttggtagccagtacctgcccgacaccgacgaccggcaccggatcgaggaaaagcggaagcggacctacgagacattcaagagcatcatgaagaagtcccccttcagcggccccaccgaccctagacctccacctagaagaatcgccgtgcccagcagatccagcgccagcgtgccaaaacctgccccccagccttaccccttcaccagcagcctgagcaccatcaactacgacgagttccctaccatggtgttccccagcggccagatctctcaggcctctgctctggctccagcccctcctcaggtgctgcctcaggctcctgctcctgcaccagctccagccatggtgtctgcactggctcaggcaccagcacccgtgcctgtgctggctcctggacctccacaggctgtggctccaccagcccctaaacctacacaggccggcgagggcacactgtctgaagctctgctgcagctgcagttcgacgacgaggatctgggagccctgctgggaaacagcaccgatcctgccgtgttcaccgacctggccagcgtggacaacagcgagttccagcagctgctgaaccagggcatccctgtggcccctcacaccaccgagcccatgctgatggaataccccgaggccatcacccggctcgtgacaggcgctcagaggcctcctgatccagctcctgcccctctgggagcaccaggcctgcctaatggactgctgtctggcgacgaggacttcagctctatcgccgatatggatttctcagccttgctgggctctggcagcggcagccgggattccagggaagggatgtttttgccgaagcctgaggccggctccgctattagtgacgtgtttgagggccgcgaggtgtgccagccaaaacgaatccggccatttcatcctccaggaagtccatgggccaaccgcccactccccgccagcctcgcaccaacaccaaccggtccagtacatgagccagtcgggtcactgaccccggcaccagtccctcagccactggatccagcgcccgcagtgactcccgaggccagtcacctgttggaggatcccgatgaagagacgagccaggctgtcaaagcccttcgggagatggccgatactgtgattccccagaaggaagaggctgcaatctgtggccaaatggacctttcccatccgcccccaaggggccatctggatgagctgacaaccacacttgagtccatgaccgaggatctgaacctggactcacccctgaccccggaattgaacgagattctggataccttcctgaacgacgagtgcctcttgcatgccatgcatatcagcacaggactgtccatcttcgacacatctctgttttga

SEQ ID NO: 295 - protein, 553 aa, synthetic construct
  REGION 1..553: note = Synthetic polypeptide
SPGIRRLDALISTSLYKKAGYKEASGSGRADALDDFDLDMLGSDALDDFDLDMLGSDALDDFDLDMLGSDALDDFDLDMLINSRSSGSPKKKRKVGSQYLPDTDDRHRIEEKRKRTYETFKSIMKKSPFSGPTDPRPPPRRIAVPSRSSASVPKPAPQPYPFTSSLSTINYDEFPTMVFPSGQISQASALAPAPPQVLPQAPAPAPAPAMVSALAQAPAPVPVLAPGPPQAVAPPAPKPTQAGEGTLSEALLQLQFDDEDLGALLGNSTDPAVFTDLASVDNSEFQQLLNQGIPVAPHTTEPMLMEYPEAITRLVTGAQRPPDPAPAPLGAPGLPNGLLSGDEDFSSIADMDFSALLGSGSGSRDSREGMFLPKPEAGSAISDVFEGREVCQPKRIRPFHPPGSPWANRPLPASLAPTPTGPVHEPVGSLTPAPVPQPLDPAPAVTPEASHLLEDPDEETSQAVKALREMADTVIPQKEEAAICGQMDLSHPPPRGHLDELTTTLESMTEDLNLDSPLTPELNEILDTFLNDECLLHAMHISTGLSIFDTSLF

SEQ ID NO: 296 - skipped

SEQ ID NO: 297 - protein, 1367 aa, synthetic construct; identical to SEQ ID NO: 2
  REGION 1..1367: note = Synthetic polypeptide

SEQ ID NO: 298 - protein, 1368 aa, synthetic construct; identical to SEQ ID NO: 4
  REGION 1..1368: note = Synthetic polypeptide

SEQ ID NO: 299 - protein, 7 aa, synthetic construct
  REGION 1..7: note = Synthetic polypeptide
PKKKRKV

SEQ ID NO: 300 - protein, 30 aa, synthetic construct
  REGION 1..30: note = Synthetic polypeptide
MDSLLMNRRKFLYQFKNVRWAKGRRETYLC

SEQ ID NO: 301 - protein, 1368 aa, synthetic construct; identical to SEQ ID NO: 4
  REGION 1..1368: note = Synthetic polypeptide

SEQ ID NO: 302 - protein, 1368 aa, synthetic construct
  REGION 1..1368: note = Synthetic polypeptide
MDKKYSIGLDIGTNSVGWAVITDEYKVPSKKFKVLGNTDRHSIKKNLIGALLFDSGETAEATRLKRTARRRYTRRKNRICYLQEIFSNEMAKVDDSFFHRLEESFLVEEDKKHERHPIFGNIVDEVAYHEKYPTIYHLRKKLVDSTDKADLRLIYLALAHMIKFRGHFLIEGDLNPDNSDVDKLFIQLVQTYNQLFEENPINASGVDAKAILSARLSKSRRLENLIAQLPGEKKNGLFGNLIALSLGLTPNFKSNFDLAEDAKLQLSKDTYDDDLDNLLAQIGDQYADLFLAAKNLSDAILLSDILRVNTEITKAPLSASMIKRYDEHHQDLTLLKALVRQQLPEKYKEIFFDQSKNGYAGYIDGGASQEEFYKFIKPILEKMDGTEELLVKLNREDLLRKQRTFDNGSIPHQIHLGELHAILRRQEDFYPFLKDNREKIEKILTFRIPYYVGPLARGNSRFAWMTRKSEETITPWNFEEVVDKGASAQSFIERMTNFDKNLPNEKVLPKHSLLYEYFTVYNELTKVKYVTEGMRKPAFLSGEQKKAIVDLLFKTNRKVTVKQLKEDYFKKIECFDSVEISGVEDRFNASLGTYHDLLKIIKDKDFLDNEENEDILEDIVLTLTLFEDREMIEERLKTYAHLFDDKVMKQLKRRRYTGWGRLSRKLINGIRDKQSGKTILDFLKSDGFANRNFMQLIHDDSLTFKEDIQKAQVSGQGDSLHEHIANLAGSPAIKKGILQTVKVVDELVKVMGRHKPENIVIEMARENQTTQKGQKNSRERMKRIEEGIKELGSQILKEHPVENTQLQNEKLYLYYLQNGRDMYVDQELDINRLSDYDVDAIVPQSFLKDDSIDNKVLTRSDKNRGKSDNVPSEEVVKKMKNYWRQLLNAKLITQRKFDNLTKAERGGLSELDKAGFIKRQLVETRQITKHVAQILDSRMNTKYDENDKLIREVKVITLKSKLVSDFRKDFQFYKVREINNYHHAHDAYLNAVVGTALIKKYPKLESEFVYGDYKVYDVRKMIAKSEQEIGKATAKYFFYSNIMNFFKTEITLANGEIRKRPLIETNGETGEIVWDKGRDFATVRKVLSMPQVNIVKKTEVQTGGFSKESILPKRNSDKLIARKKDWDPKKYGGFDSPTVAYSVLVVAKVEKGKSKKLKSVKELLGITIMERSSFEKNPIDFLEAKGYKEVKKDLIIKLPKYSLFELENGRKRMLASAGELQKGNELALPSKYVNFLYLASHYEKLKGSPEDNEQKQLFVEQHKHYLDEIIEQISEFSKRVILADANLDKVLSAYNKHRDKPIREQAENIIHLFTLTNLGAPAAFKYFDTTIDRKRYTSTKEVLDATLIHQSITGLYETRIDLSQLGGD

SEQ ID NO: 303 - protein, 181 aa, Erwinia tasmaniensis
MASRGVNKVILVGNLGQDPEVRYMPNGGAVANITLATSESWRDKQTGETKEKTEWHRVVLFGKLAEVAGEYLRKGSQVYIEGALQTRKWTDQAGVEKYTTEVVVNVGGTMQMLGGRSQGGGASAGGQNGGSNNGWGQPQQPQGGNQFSGGAQQQARPQQQPQQNNAPANNEPPIDFDDDIP

SEQ ID NO: 304 - protein, 209 aa, synthetic construct
  REGION 1..209: note = Synthetic Polypeptide
MAGAQDFVPHTADLAELAAAAGECRGCGLYRDATQAVFGAGGRSARIMMIGEQPGDKEDLAGLPFVGPAGRLLDRALEAADIDRDALYVTNAVKHFKFTRAAGGKRRIHKTPSRTEVVACRPWLIAEMTSVEPDVVVLLGATAAKALLGNDFRVTQHRGEVLHVDDVPGDPALVATVHPSSLLRGPKEERESAFAGLVDDLRVAADVRP

SEQ ID NO: 305 - protein, 313 aa, synthetic construct
  REGION 1..313: note = Synthetic Polypeptide
MIGQKTLYSFFSPSPARKRHAPSPEPAVQGTGVAGVPEESGDAAAIPAKKAPAGQEEPGTPPSSPLSAEQLDRIQRNKAAALLRLAARNVPVGFGESWKKHLSGEFGKPYFIKLMGFVAEERKHYTVYPPPHQVFTWTQMCDIKDVKVVILGQEPYHGPNQAHGLCFSVQRPVPPPPSLENIYKELSTDIEDFVHPGHGDLSGWAKQGVLLLNAVLTVRAHQANSHKERGWEQFTDAVVSWLNQNSNGLVFLLWGSYAQKKGSAIDRKRHHVLQTAHPSPLSVYRGFFGCRHFSKTNELLQKSGKKPIDWKEL

SEQ ID NO: 306 - protein, 1368 aa, Streptococcus pyogenes
MDKKYSIGLDIGTNSVGWAVITDEYKVPSKKFKVLGNTDRHSIKKNLIGALLFDSGETAEATRLKRTARRRYTRRKNRICYLQEIFSNEMAKVDDSFFHRLEESFLVEEDKKHERHPIFGNIVDEVAYHEKYPTIYHLRKKLVDSTDKADLRLIYLALAHMIKFRGHFLIEGDLNPDNSDVDKLFIQLVQTYNQLFEENPINASGVDAKAILSARLSKSRRLENLIAQLPGEKKNGLFGNLIALSLGLTPNFKSNFDLAEDAKLQLSKDTYDDDLDNLLAQIGDQYADLFLAAKNLSDAILLSDILRVNTEITKAPLSASMIKRYDEHHQDLTLLKALVRQQLPEKYKEIFFDQSKNGYAGYIDGGASQEEFYKFIKPILEKMDGTEELLVKLNREDLLRKQRTFDNGSIPHQIHLGELHAILRRQEDFYPFLKDNREKIEKILTFRIPYYVGPLARGNSRFAWMTRKSEETITPWNFEEVVDKGASAQSFIERMTAFDKNLPNEKVLPKHSLLYEYFTVYNELTKVKYVTEGMRKPAFLSGEQKKAIVDLLFKTNRKVTVKQLKEDYFKKIECFDSVEISGVEDRFNASLGTYHDLLKIIKDKDFLDNEENEDILEDIVLTLTLFEDREMIEERLKTYAHLFDDKVMKQLKRRRYTGWGALSRKLINGIRDKQSGKTILDFLKSDGFANRNFMALIHDDSLTFKEDIQKAQVSGQGDSLHEHIANLAGSPAIKKGILQTVKVVDELVKVMGRHKPENIVIEMARENQTTQKGQKNSRERMKRIEEGIKELGSQILKEHPVENTQLQNEKLYLYYLQNGRDMYVDQELDINRLSDYDVDHIVPQSFLKDDSIDNKVLTRSDKNRGKSDNVPSEEVVKKMKNYWRQLLNAKLITQRKFDNLTKAERGGLSELDKAGFIKRQLVETRAITKHVAQILDSRMNTKYDENDKLIREVKVITLKSKLVSDFRKDFQFYKVREINNYHHAHDAYLNAVVGTALIKKYPKLESEFVYGDYKVYDVRKMIAKSEQEIGKATAKYFFYSNIMNFFKTEITLANGEIRKRPLIETNGETGEIVWDKGRDFATVRKVLSMPQVNIVKKTEVQTGGFSKESILPKRNSDKLIARKKDWDPKKYGGFDSPTVAYSVLVVAKVEKGKSKKLKSVKELLGITIMERSSFEKNPIDFLEAKGYKEVKKDLIIKLPKYSLFELENGRKRMLASAGELQKGNELALPSKYVNFLYLASHYEKLKGSPEDNEQKQLFVEQHKHYLDEIIEQISEFSKRVILADANLDKVLSAYNKHRDKPIREQAENIIHLFTLTNLGAPAAFKYFDTTIDRKRYTSTKEVLDATLIHQSITGLYETRIDLSQLGGD

SEQ ID NO: 307 - protein, 1052 aa, Staphylococcus aureus
KRNYILGLDIGITSVGYGIIDYETRDVIDAGVRLFKEANVENNEGRRSKRGARRLKRRRRHRIQRVKKLLFDYNLLTDHSELSGINPYEARVKGLSQKLSEEEFSAALLHLAKRRGVHNVNEVEEDTGNELSTKEQISRNSKALEEKYVAELQLERLKKDGEVRGSINRFKTSDYVKEAKQLLKVQKAYHQLDQSFIDTYIDLLETRRTYYEGPGEGSPFGWKDIKEWYEMLMGHCTYFPEELRSVKYAYNADLYNALNDLNNLVITRDENEKLEYYEKFQIIENVFKQKKKPTLKQIAKEILVNEEDIKGYRVTSTGKPEFTNLKVYHDIKDITARKEIIENAELLDQIAKILTIYQSSEDIQEELTNLNSELTQEEIEQISNLKGYTGTHNLSLKAINLILDELWHTNDNQIAIFNRLKLVPKKVDLSQQKEIPTTLVDDFILSPVVKRSFIQSIKVINAIIKKYGLPNDIIIELAREKNSKDAQKMINEMQKRNRQTNERIEEIIRTTGKENAKYLIEKIKLHDMQEGKCLYSLEAIPLEDLLNNPFNYEVDHIIPRSVSFDNSFNNKVLVKQEENSKKGNRTPFQYLSSSDSKISYETFKKHILNLAKGKGRISKTKKEYLLEERDINRFSVQKDFINRNLVDTRYATRGLMNLLRSYFRVNNLDVKVKSINGGFTSFLRRKWKFKKERNKGYKHHAEDALIIANADFIFKEWKKLDKAKKVMENQMFEEKQAESMPEIETEQEYKEIFITPHQIKHIKDFKDYKYSHRVDKKPNRELINDTLYSTRKDDKGNTLIVNNLNGLYDKDNDKLKKLINKSPEKLLMYHHDPQTYQKLKLIMEQYGDEKNPLYKYYEETGNYLTKYSKKDNGPVIKKIKYYGNKLNAHLDITDDYPNSRNKVVKLSLKPYRFDVYLDNGVYKFVTVKNLDVIKKENYYEVNSKCYEEAKKLKKISNQAEFIASFYNNDLIKINGELYRVIGVNNDLLNRIEVNMIDITYREYLENMNDKRPPRIIKTIASKTQSIKKYSTDILGNLYEVKSKKHPQIIKKG

SEQ ID NO: 308 - protein, 1052 aa, Staphylococcus aureus
KRNYILGLDIGITSVGYGIIDYETRDVIDAGVRLFKEANVENNEGRRSKRGARRLKRRRRHRIQRVKKLLFDYNLLTDHSELSGINPYEARVKGLSQKLSEEEFSAALLHLAKRRGVHNVNEVEEDTGNELSTKEQISRNSKALEEKYVAELQLERLKKDGEVRGSINRFKTSDYVKEAKQLLKVQKAYHQLDQSFIDTYIDLLETRRTYYEGPGEGSPFGWKDIKEWYEMLMGHCTYFPEELRSVKYAYNADLYNALNDLNNLVITRDENEKLEYYEKFQIIENVFKQKKKPTLKQIAKEILVNEEDIKGYRVTSTGKPEFTNLKVYHDIKDITARKEIIENAELLDQIAKILTIYQSSEDIQEELTNLNSELTQEEIEQISNLKGYTGTHNLSLKAINLILDELWHTNDNQIAIFNRLKLVPKKVDLSQQKEIPTTLVDDFILSPVVKRSFIQSIKVINAIIKKYGLPNDIIIELAREKNSKDAQKMINEMQKRNRQTNERIEEIIRTTGKENAKYLIEKIKLHDMQEGKCLYSLEAIPLEDLLNNPFNYEVDHIIPRSVSFDNSFNNKVLVKQEEASKKGNRTPFQYLSSSDSKISYETFKKHILNLAKGKGRISKTKKEYLLEERDINRFSVQKDFINRNLVDTRYATRGLMNLLRSYFRVNNLDVKVKSINGGFTSFLRRKWKFKKERNKGYKHHAEDALIIANADFIFKEWKKLDKAKKVMENQMFEEKQAESMPEIETEQEYKEIFITPHQIKHIKDFKDYKYSHRVDKKPNRELINDTLYSTRKDDKGNTLIVNNLNGLYDKDNDKLKKLINKSPEKLLMYHHDPQTYQKLKLIMEQYGDEKNPLYKYYEETGNYLTKYSKKDNGPVIKKIKYYGNKLNAHLDITDDYPNSRNKVVKLSLKPYRFDVYLDNGVYKFVTVKNLDVIKKENYYEVNSKCYEEAKKLKKISNQAEFIASFYNNDLIKINGELYRVIGVNNDLLNRIEVNMIDITYREYLENMNDKRPPRIIKTIASKTQSIKKYSTDILGNLYEVKSKKHPQIIKKG

SEQ ID NO: 309 - protein, 1052 aa, Staphylococcus aureus
KRNYILGLDIGITSVGYGIIDYETRDVIDAGVRLFKEANVENNEGRRSKRGARRLKRRRRHRIQRVKKLLFDYNLLTDHSELSGINPYEARVKGLSQKLSEEEFSAALLHLAKRRGVHNVNEVEEDTGNELSTKEQISRNSKALEEKYVAELQLERLKKDGEVRGSINRFKTSDYVKEAKQLLKVQKAYHQLDQSFIDTYIDLLETRRTYYEGPGEGSPFGWKDIKEWYEMLMGHCTYFPEELRSVKYAYNADLYNALNDLNNLVITRDENEKLEYYEKFQIIENVFKQKKKPTLKQIAKEILVNEEDIKGYRVTSTGKPEFTNLKVYHDIKDITARKEIIENAELLDQIAKILTIYQSSEDIQEELTNLNSELTQEEIEQISNLKGYTGTHNLSLKAINLILDELWHTNDNQIAIFNRLKLVPKKVDLSQQKEIPTTLVDDFILSPVVKRSFIQSIKVINAIIKKYGLPNDIIIELAREKNSKDAQKMINEMQKRNRQTNERIEEIIRTTGKENAKYLIEKIKLHDMQEGKCLYSLEAIPLEDLLNNPFNYEVDHIIPRSVSFDNSFNNKVLVKQEEASKKGNRTPFQYLSSSDSKISYETFKKHILNLAKGKGRISKTKKEYLLEERDINRFSVQKDFINRNLVDTRYATRGLMNLLRSYFRVNNLDVKVKSINGGFTSFLRRKWKFKKERNKGYKHHAEDALIIANADFIFKEWKKLDKAKKVMENQMFEEKQAESMPEIETEQEYKEIFITPHQIKHIKDFKDYKYSHRVDKKPNRKLINDTLYSTRKDDKGNTLIVNNLNGLYDKDNDKLKKLINKSPEKLLMYHHDPQTYQKLKLIMEQYGDEKNPLYKYYEETGNYLTKYSKKDNGPVIKKIKYYGNKLNAHLDITDDYPNSRNKVVKLSLKPYRFDVYLDNGVYKFVTVKNLDVIKKENYYEVNSKCYEEAKKLKKISNQAEFIASFYKNDLIKINGELYRVIGVNNDLLNRIEVNMIDITYREYLENMNDKRPPHIIKTIASKTQSIKKYSTDILGNLYEVKSKKHPQIIKKG

SEQ ID NO: 310 - protein, 1367 aa, Streptococcus pyogenes
DKKYSIGLAIGTNSVGWAVITDEYKVPSKKFKVLGNTDRHSIKKNLIGALLFDSGETAEATRLKRTARRRYTRRKNRICYLQEIFSNEMAKVDDSFFHRLEESFLVEEDKKHERHPIFGNIVDEVAYHEKYPTIYHLRKKLVDSTDKADLRLIYLALAHMIKFRGHFLIEGDLNPDNSDVDKLFIQLVQTYNQLFEENPINASGVDAKAILSARLSKSRRLENLIAQLPGEKKNGLFGNLIALSLGLTPNFKSNFDLAEDAKLQLSKDTYDDDLDNLLAQIGDQYADLFLAAKNLSDAILLSDILRVNTEITKAPLSASMIKRYDEHHQDLTLLKALVRQQLPEKYKEIFFDQSKNGYAGYIDGGASQEEFYKFIKPILEKMDGTEELLVKLNREDLLRKQRTFDNGSIPHQIHLGELHAILRRQEDFYPFLKDNREKIEKILTFRIPYYVGPLARGNSRFAWMTRKSEETITPWNFEEVVDKGASAQSFIERMTNFDKNLPNEKVLPKHSLLYEYFTVYNELTKVKYVTEGMRKPAFLSGEQKKAIVDLLFKTNRKVTVKQLKEDYFKKIECFDSVEISGVEDRFNASLGTYHDLLKIIKDKDFLDNEENEDILEDIVLTLTLFEDREMIEERLKTYAHLFDDKVMKQLKRRRYTGWGRLSRKLINGIRDKQSGKTILDFLKSDGFANRNFMQLIHDDSLTFKEDIQKAQVSGQGDSLHEHIANLAGSPAIKKGILQTVKVVDELVKVMGRHKPENIVIEMARENQTTQKGQKNSRERMKRIEEGIKELGSQILKEHPVENTQLQNEKLYLYYLQNGRDMYVDQELDINRLSDYDVDHIVPQSFLKDDSIDNKVLTRSDKNRGKSDNVPSEEVVKKMKNYWRQLLNAKLITQRKFDNLTKAERGGLSELDKAGFIKRQLVETRQITKHVAQILDSRMNTKYDENDKLIREVKVITLKSKLVSDFRKDFQFYKVREINNYHHAHDAYLNAVVGTALIKKYPKLESEFVYGDYKVYDVRKMIAKSEQEIGKATAKYFFYSNIMNFFKTEITLANGEIRKRPLIETNGETGEIVWDKGRDFATVRKVLSMPQVNIVKKTEVQTGGFSKESILPKRNSDKLIARKKDWDPKKYGGFDSPTVAYSVLVVAKVEKGKSKKLKSVKELLGITIMERSSFEKNPIDFLEAKGYKEVKKDLIIKLPKYSLFELENGRKRMLASAGELQKGNELALPSKYVNFLYLASHYEKLKGSPEDNEQKQLFVEQHKHYLDEIIEQISEFSKRVILADANLDKVLSAYNKHRDKPIREQAENIIHLFTLTNLGAPAAFKYFDTTIDRKRYTSTKEVLDATLIHQSITGLYETRIDLSQLGGD

SEQ ID NO: 311 - protein, 1367 aa, Streptococcus pyogenes
DKKYSIGLAIGTNSVGWAVITDEYKVPSKKFKVLGNTDRHSIKKNLIGALLFDSGETAEATRLKRTARRRYTRRKNRICYLQEIFSNEMAKVDDSFFHRLEESFLVEEDKKHERHPIFGNIVDEVAYHEKYPTIYHLRKKLVDSTDKADLRLIYLALAHMIKFRGHFLIEGDLNPDNSDVDKLFIQLVQTYNQLFEENPINASGVDAKAILSARLSKSRRLENLIAQLPGEKKNGLFGNLIALSLGLTPNFKSNFDLAEDAKLQLSKDTYDDDLDNLLAQIGDQYADLFLAAKNLSDAILLSDILRVNTEITKAPLSASMIKRYDEHHQDLTLLKALVRQQLPEKYKEIFFDQSKNGYAGYIDGGASQEEFYKFIKPILEKMDGTEELLVKLNREDLLRKQRTFDNGSIPHQIHLGELHAILRRQEDFYPFLKDNREKIEKILTFRIPYYVGPLARGNSRFAWMTRKSEETITPWNFEEVVDKGASAQSFIERMTNFDKNLPNEKVLPKHSLLYEYFTVYNELTKVKYVTEGMRKPAFLSGEQKKAIVDLLFKTNRKVTVKQLKEDYFKKIECFDSVEISGVEDRFNASLGTYHDLLKIIKDKDFLDNEENEDILEDIVLTLTLFEDREMIEERLKTYAHLFDDKVMKQLKRRRYTGWGRLSRKLINGIRDKQSGKTILDFLKSDGFANRNFMQLIHDDSLTFKEDIQKAQVSGQGDSLHEHIANLAGSPAIKKGILQTVKVVDELVKVMGRHKPENIVIEMARENQTTQKGQKNSRERMKRIEEGIKELGSQILKEHPVENTQLQNEKLYLYYLQNGRDMYVDQELDINRLSDYDVDHIVPQSFLKDDSIDNKVLTRSDKNRGKSDNVPSEEVVKKMKNYWRQLLNAKLITQRKFDNLTKAERGGLSELDKAGFIKRQLVETRQITKHVAQILDSRMNTKYDENDKLIREVKVITLKSKLVSDFRKDFQFYKVREINNYHHAHDAYLNAVVGTALIKKYPKLESEFVYGDYKVYDVRKMIAKSEQEIGKATAKYFFYSNIMNFFKTEITLANGEIRKRPLIETNGETGEIVWDKGRDFATVRKVLSMPQVNIVKKTEVQTGGFSKESILPKRNSDKLIARKKDWDPKKYGGFESPTVAYSVLVVAKVEKGKSKKLKSVKELLGITIMERSSFEKNPIDFLEAKGYKEVKKDLIIKLPKYSLFELENGRKRMLASAGELQKGNELALPSKYVNFLYLASHYEKLKGSPEDNEQKQLFVEQHKHYLDEIIEQISEFSKRVILADANLDKVLSAYNKHRDKPIREQAENIIHLFTLTNLGAPAAFKYFDTTIDRKQYRSTKEVLDATLIHQSITGLYETRIDLSQLGGD

SEQ ID NO: 312 - protein, 1367 aa, Streptococcus pyogenes
DKKYSIGLAIGTNSVGWAVITDEYKVPSKKFKVLGNTDRHSIKKNLIGALLFDSGETAEATRLKRTARRRYTRRKNRICYLQEIFSNEMAKVDDSFFHRLEESFLVEEDKKHERHPIFGNIVDEVAYHEKYPTIYHLRKKLVDSTDKADLRLIYLALAHMIKFRGHFLIEGDLNPDNSDVDKLFIQLVQTYNQLFEENPINASGVDAKAILSARLSKSRRLENLIAQLPGEKKNGLFGNLIALSLGLTPNFKSNFDLAEDAKLQLSKDTYDDDLDNLLAQIGDQYADLFLAAKNLSDAILLSDILRVNTEITKAPLSASMIKRYDEHHQDLTLLKALVRQQLPEKYKEIFFDQSKNGYAGYIDGGASQEEFYKFIKPILEKMDGTEELLVKLNREDLLRKQRTFDNGSIPHQIHLGELHAILRRQEDFYPFLKDNREKIEKILTFRIPYYVGPLARGNSRFAWMTRKSEETITPWNFEEVVDKGASAQSFIERMTNFDKNLPNEKVLPKHSLLYEYFTVYNELTKVKYVTEGMRKPAFLSGEQKKAIVDLLFKTNRKVTVKQLKEDYFKKIECFDSVEISGVEDRFNASLGTYHDLLKIIKDKDFLDNEENEDILEDIVLTLTLFEDREMIEERLKTYAHLFDDKVMKQLKRRRYTGWGRLSRKLINGIRDKQSGKTILDFLKSDGFANRNFMQLIHDDSLTFKEDIQKAQVSGQGDSLHEHIANLAGSPAIKKGILQTVKVVDELVKVMGRHKPENIVIEMARENQTTQKGQKNSRERMKRIEEGIKELGSQILKEHPVENTQLQNEKLYLYYLQNGRDMYVDQELDINRLSDYDVDHIVPQSFLKDDSIDNKVLTRSDKNRGKSDNVPSEEVVKKMKNYWRQLLNAKLITQRKFDNLTKAERGGLSELDKAGFIKRQLVETRQITKHVAQILDSRMNTKYDENDKLIREVKVITLKSKLVSDFRKDFQFYKVREINNYHHAHDAYLNAVVGTALIKKYPKLESEFVYGDYKVYDVRKMIAKSEQEIGKATAKYFFYSNIMNFFKTEITLANGEIRKRPLIETNGETGEIVWDKGRDFATVRKVLSMPQVNIVKKTEVQTGGFSKESILPKRNSDKLIARKKDWDPKKYGGFVSPTVAYSVLVVAKVEKGKSKKLKSVKELLGITIMERSSFEKNPIDFLEAKGYKEVKKDLIIKLPKYSLFELENGRKRMLASAGELQKGNELALPSKYVNFLYLASHYEKLKGSPEDNEQKQLFVEQHKHYLDEIIEQISEFSKRVILADANLDKVLSAYNKHRDKPIREQAENIIHLFTLTNLGAPAAFKYFDTTIDRKQYRSTKEVLDATLIHQSITGLYETRIDLSQLGGD

SEQ ID NO: 313 - protein, 1367 aa, Streptococcus pyogenes
DKKYSIGLAIGTNSVGWAVITDEYKVPSKKFKVLGNTDRHSIKKNLIGALLFDSGETAEATRLKRTARRRYTRRKNRICYLQEIFSNEMAKVDDSFFHRLEESFLVEEDKKHERHPIFGNIVDEVAYHEKYPTIYHLRKKLVDSTDKADLRLIYLALAHMIKFRGHFLIEGDLNPDNSDVDKLFIQLVQTYNQLFEENPINASGVDAKAILSARLSKSRRLENLIAQLPGEKKNGLFGNLIALSLGLTPNFKSNFDLAEDAKLQLSKDTYDDDLDNLLAQIGDQYADLFLAAKNLSDAILLSDILRVNTEITKAPLSASMIKRYDEHHQDLTLLKALVRQQLPEKYKEIFFDQSKNGYAGYIDGGASQEEFYKFIKPILEKMDGTEELLVKLNREDLLRKQRTFDNGSIPHQIHLGELHAILRRQEDFYPFLKDNREKIEKILTFRIPYYVGPLARGNSRFAWMTRKSEETITPWNFEEVVDKGASAQSFIERMTNFDKNLPNEKVLPKHSLLYEYFTVYNELTKVKYVTEGMRKPAFLSGEQKKAIVDLLFKTNRKVTVKQLKEDYFKKIECFDSVEISGVEDRFNASLGTYHDLLKIIKDKDFLDNEENEDILEDIVLTLTLFEDREMIEERLKTYAHLFDDKVMKQLKRRRYTGWGRLSRKLINGIRDKQSGKTILDFLKSDGFANRNFMQLIHDDSLTFKEDIQKAQVSGQGDSLHEHIANLAGSPAIKKGILQTVKVVDELVKVMGRHKPENIVIEMARENQTTQKGQKNSRERMKRIEEGIKELGSQILKEHPVENTQLQNEKLYLYYLQNGRDMYVDQELDINRLSDYDVDHIVPQSFLKDDSIDNKVLTRSDKNRGKSDNVPSEEVVKKMKNYWRQLLNAKLITQRKFDNLTKAERGGLSELDKAGFIKRQLVETRQITKHVAQILDSRMNTKYDENDKLIREVKVITLKSKLVSDFRKDFQFYKVREINNYHHAHDAYLNAVVGTALIKKYPKLESEFVYGDYKVYDVRKMIAKSEQEIGKATAKYFFYSNIMNFFKTEITLANGEIRKRPLIETNGETGEIVWDKGRDFATVRKVLSMPQVNIVKKTEVQTGGFSKESILPKRNSDKLIARKKDWDPKKYGGFVSPTVAYSVLVVAKVEKGKSKKLKSVKELLGITIMERSSFEKNPIDFLEAKGYKEVKKDLIIKLPKYSLFELENGRKRMLASARELQKGNELALPSKYVNFLYLASHYEKLKGSPEDNEQKQLFVEQHKHYLDEIIEQISEFSKRVILADANLDKVLSAYNKHRDKPIREQAENIIHLFTLTNLGAPAAFKYFDTTIDRKEYRSTKEVLDATLIHQSITGLYETRIDLSQLGGD

SEQ ID NO: 314 - DNA, 20 bp, synthetic construct
  misc_feature 1..20: note = Synthetic Polynucleotide
  source 1..20: mol_type = other DNA
ggggccactagggacaggat

SEQ ID NO: 315 - DNA, 20 bp, synthetic construct
  misc_feature 1..20: note = Synthetic Polynucleotide
  source 1..20: mol_type = other DNA
gggtggggggagtttgctcc

SEQ ID NO: 316 - DNA, 20 bp, synthetic construct
  misc_feature 1..20: note = Synthetic Polynucleotide
  source 1..20: mol_type = other DNA
gcagatgtagtgtttccaca

SEQ ID NO: 317 - DNA, 20 bp, synthetic construct
  misc_feature 1..20: note = Synthetic Polynucleotide
  source 1..20: mol_type = other DNA
tcactatgctgccgcccagt

SEQ ID NO: 318-552 - skipped (235 entries)

SEQ ID NO: 553 - protein, 84 aa, synthetic construct
  REGION 1..84: note = Synthetic polypeptide
MTNLSDIIEKETGKQLVIQESILMLPEEVEEVIGNKPESDILVHTAYDESTDENVMLLTSDAPEYKPWALVIQDSNGENKIKML

SEQ ID NO: 554-673 - skipped (120 entries)

SEQ ID NO: 674 - DNA, 51 bp, synthetic construct
  misc_feature 1..51: note = Synthetic polynucleotide
  source 1..51: mol_type = other DNA
atgttcactgttgacttctggactaytatggaaaatcacaaccacagcaag

SEQ ID NO: 675 - DNA, 51 bp, synthetic construct
  misc_feature 1..51: note = Synthetic polynucleotide
  source 1..51: mol_type = other DNA
gctgggagctgccatgtgtgggcgcygcatgcgaggagaggctggaggggg

SEQ ID NO: 676 - DNA, 51 bp, synthetic construct
  misc_feature 1..51: note = Synthetic polynucleotide
  source 1..51: mol_type = other DNA
cgtggcgctggccatcctcaagttcytccacaaggtgagggccgggcagcc

SEQ ID NO: 677 - DNA, 51 bp, synthetic construct
  misc_feature 1..51: note = Synthetic polynucleotide
  source 1..51: mol_type = other DNA
catcttctgcttcattgtgcctctcbccctcatctgcttctcctacactca

SEQ ID NO: 678 - DNA, 51 bp, synthetic construct
  misc_feature 1..51: note = Synthetic polynucleotide
  source 1..51: mol_type = other DNA
aaaaggattaaaatgttttttgcccygggtcctgtggcttccgtcgccttc

SEQ ID NO: 679 - DNA, 51 bp, synthetic construct
  misc_feature 1..51: note = Synthetic polynucleotide
  source 1..51: mol_type = other DNA
ctgaagccgcgccctctgcagatcaytggggtggatcccgaagggtccatc

SEQ ID NO: 680 - DNA, 51 bp, synthetic construct
  misc_feature 1..51: note = Synthetic polynucleotide
  source 1..51: mol_type = other DNA
ttcggggtggtcaccgccattgactygctgaacttcgtggccgcccaggag

SEQ ID NO: 681 - DNA, 51 bp, synthetic construct
  misc_feature 1..51: note = Synthetic polynucleotide
  source 1..51: mol_type = other DNA
cgcccacttctcacccctggtcttcytcctcctcctatccatcatgatggc

SEQ ID NO: 682 - DNA, 51 bp, synthetic construct
  misc_feature 1..51: note = Synthetic polynucleotide
  source 1..51: mol_type = other DNA
cttttcagcggctgcctcagttacgycaaggtgatgctgggcgtggtcctg

SEQ ID NO: 683 - DNA, 51 bp, synthetic construct
  misc_feature 1..51: note = Synthetic polynucleotide
  source 1..51: mol_type = other DNA
ggaatataagtatggtgcacacaacyaccatcctttacctgtagccctgga

SEQ ID NO: 684 - DNA, 51 bp, synthetic construct
  misc_feature 1..51: note = Synthetic polynucleotide
  source 1..51: mol_type = other DNA
tgtctacgacttcgagataatggacytctggccaagccaacccatggcgac

SEQ ID NO: 685 - DNA, 51 bp, synthetic construct
  misc_feature 1..51: note = Synthetic polynucleotide
  source 1..51: mol_type = other DNA
tttagattgggatgcttggaaggtgygtctacgacttcgagataatggact

SEQ ID NO: 686 - DNA, 51 bp, synthetic construct
  misc_feature 1..51: note = Synthetic polynucleotide
  source 1..51: mol_type = other DNA
tgttgaagatcggatgtccgtaataygggaaaaaggcgtggtgggtttcac

SEQ ID NO: 687 - DNA, 51 bp, synthetic construct
  misc_feature 1..51: note = Synthetic polynucleotide
  source 1..51: mol_type = other DNA
tccagaattctttggggctgttataygtgccaatgtgactggaagttacgg

SEQ ID NO: 688 - DNA, 51 bp, synthetic construct
  misc_feature 1..51: note = Synthetic polynucleotide
  source 1..51: mol_type = other DNA
gtgtgagagagagcagtgtgacggcyctgtaggctttggaggaagtcctga

SEQ ID NO: 689 - DNA, 51 bp, synthetic construct
  misc_feature 1..51: note = Synthetic polynucleotide
  source 1..51: mol_type = other DNA
caagtttcccgctggagggaagatgyctcagtacctggagagcatgcagat

SEQ ID NO: 690 - DNA, 51 bp, synthetic construct
  misc_feature 1..51: note = Synthetic polynucleotide
  source 1..51: mol_type = other DNA
gagttccggggccccagtgggctgcyggtctaccagggcaaaggtgattcg

SEQ ID NO: 691 - DNA, 51 bp, synthetic construct
  misc_feature 1..51: note = Synthetic polynucleotide
  source 1..51: mol_type = other DNA
gaaggaccctgatgaccacactgtgygccacctgctctttgccaaccaggt

SEQ ID NO: 692 - DNA, 51 bp, synthetic construct
  misc_feature 1..51: note = Synthetic polynucleotide
  source 1..51: mol_type = other DNA
ccgtcaccccagcacatcctgggccyccctgtcggtgagtcacgcccctgc

SEQ ID NO: 693 - DNA, 51 bp, synthetic construct
  misc_feature 1..51: note = Synthetic polynucleotide
  source 1..51: mol_type = other DNA
cctggagacatccaggtggtgcccaytggagtgggccctaatgccaacgtg

SEQ ID NO: 694 - DNA, 51 bp, synthetic construct
  misc_feature 1..51: note = Synthetic polynucleotide
  source 1..51: mol_type = other DNA
ctacatggtcaccggaaatcctgccyctgatgagatcaagaggctgcctgg

SEQ ID NO: 695 - DNA, 51 bp, synthetic construct
  misc_feature 1..51: note = Synthetic polynucleotide
  source 1..51: mol_type = other DNA
ggaaccgccgttgcacgatttctacbgcagcaggctactggacctggtctt

SEQ ID NO: 696 - DNA, 51 bp, synthetic construct
  misc_feature 1..51: note = Synthetic polynucleotide
  source 1..51: mol_type = other DNA
caacgatgtgcaggaccagtgctccygctgctctccgacacggacggagcc

SEQ ID NO: 697 - DNA, 51 bp, synthetic construct
  misc_feature 1..51: note = Synthetic polynucleotide
  source 1..51: mol_type = other DNA
tgagtgtgagtggcgctataacagcygtgcacctgcctgtcaagtcacgtg

SEQ ID NO: 698 - DNA, 51 bp, synthetic construct
  misc_feature 1..51: note = Synthetic polynucleotide
  source 1..51: mol_type = other DNA
gaagcagacgatggtggattcctccygtagaatccttaccagtgacgtctt

SEQ ID NO: 699 - DNA, 51 bp, synthetic construct
  misc_feature 1..51: note = Synthetic polynucleotide
  source 1..51: mol_type = other DNA
tgtttggaatacatgactccatggcygtcaaatctagttcgtttttgcaag

SEQ ID NO: 700 - DNA, 51 bp, synthetic construct
  misc_feature 1..51: note = Synthetic polynucleotide
  source 1..51: mol_type = other DNA
attcatgcagatccaaagctcttgcyttgtgtaagtatttttttatgaaat

SEQ ID NO: 701 - DNA, 51 bp, synthetic construct
  misc_feature 1..51: note = Synthetic polynucleotide
  source 1..51: mol_type = other DNA
attttagcacgctacatgctgatgcygtccttcaacaattcccttgatgtg

SEQ ID NO: 702 - DNA, 51 bp, synthetic construct
  misc_feature 1..51: note = Synthetic polynucleotide
  source 1..51: mol_type = other DNA
ctgttggggtttttatagaacctgcyttttaatccaagtaagccattctca

SEQ ID NO: 703 - DNA, 51 bp, synthetic construct
  misc_feature 1..51: note = Synthetic polynucleotide
  source 1..51: mol_type = other DNA
tctcaggatgaactagctcgagttcyggttactctgtttgattctcggcat

SEQ ID NO: 704 - DNA, 51 bp, synthetic construct
  misc_feature 1..51: note = Synthetic polynucleotide
  source 1..51: mol_type = other DNA
ctccggctccaagcacctccactacyggtctgccgccctgccttctgggcg

SEQ ID NO: 705 - DNA, 51 bp, synthetic construct
  misc_feature 1..51: note = Synthetic polynucleotide
  source 1..51: mol_type = other DNA
atctcctacaggctttggtcttctcyccagacccactgctgctctcaaaac

SEQ ID NO: 706 - DNA, 51 bp, synthetic construct
  misc_feature 1..51: note = Synthetic polynucleotide
  source 1..51: mol_type = other DNA
gatgtagacatggcctgcaatttcaygggggatgagtggtttgtggattcc

SEQ ID NO: 707 - DNA, 51 bp, synthetic construct
  misc_feature 1..51: note = Synthetic polynucleotide
  source 1..51: mol_type = other DNA
gcgtacctatgggcttccttgccacygtcccttcaaagaagtaagtactta

SEQ ID NO: 708 - DNA, 51 bp, synthetic construct
  misc_feature 1..51: note = Synthetic polynucleotide
  source 1..51: mol_type = other DNA
ccagagtttgcccaggagctgcaacygtacggacacatctacatgtaccgg

SEQ ID NO: 709 - DNA, 51 bp, synthetic construct
  misc_feature 1..51: note = Synthetic polynucleotide
  source 1..51: mol_type = other DNA
atatggagtgatacccaaaatccagygccttccaccaagccaggttagaca

SEQ ID NO: 710 - DNA, 51 bp, synthetic construct
  misc_feature 1..51: note = Synthetic polynucleotide
  source 1..51: mol_type = other DNA
gacttcgccgcgcgttggtcagccayggccaccgctctcgcgctacgtagc

SEQ ID NO: 711 - DNA, 51 bp, synthetic construct
  misc_feature 1..51: note = Synthetic polynucleotide
  source 1..51: mol_type = other DNA
catgaacaccttcagcgtcatgcccycacccaaggtgtcagacacggtggt

SEQ ID NO: 712 - DNA, 51 bp, synthetic construct
  misc_feature 1..51: note = Synthetic polynucleotide
  source 1..51: mol_type = other DNA
cccacctacggggacctcaaccaccyggtgtcggccaccatgagcggggtc

SEQ ID NO: 713 - DNA, 51 bp, synthetic construct
  misc_feature 1..51: note = Synthetic polynucleotide
  source 1..51: mol_type = other DNA
catggtgcccttccctcgcctgcacytcttcatgcccggcttcgcgcccct

SEQ ID NO: 714 - DNA, 51 bp, synthetic construct
  misc_feature 1..51: note = Synthetic polynucleotide
  source 1..51: mol_type = other DNA
tcgaacacaaactcatgcaactctgygttccacttcggccaagaaattaga

SEQ ID NO: 715 - DNA, 51 bp, synthetic construct
  misc_feature 1..51: note = Synthetic polynucleotide
  source 1..51: mol_type = other DNA
catccgggaagatgatgggaagacaygtaccaggggagacaaatatcccaa

SEQ ID NO: 716 - DNA, 51 bp, synthetic construct
  misc_feature 1..51: note = Synthetic polynucleotide
  source 1..51: mol_type = other DNA
gaaagatggtgttgactttgggaagyggcgtgctgtgctgaggattgccga

SEQ ID NO: 717 - DNA, 51 bp, synthetic construct
  misc_feature 1..51: note = Synthetic polynucleotide
  source 1..51: mol_type = other DNA
aaccaaagctgttttctccttccagygggttgccagcgttgatgtggtgga

SEQ ID NO: 718 - DNA, 51 bp, synthetic construct
  misc_feature 1..51: note = Synthetic polynucleotide
  source 1..51: mol_type = other DNA
gcagacacagctcacgctgcagtggygagactcgcccgcagggtacactga

SEQ ID NO: 719 - DNA, 51 bp, synthetic construct
  misc_feature 1..51: note = Synthetic polynucleotide
  source 1..51: mol_type = other DNA
aaaatgtactaattttttaaggtttyctggaagcaagctaaagaatgaggt

SEQ ID NO: 720 - DNA, 51 bp, synthetic construct
  misc_feature 1..51: note = Synthetic polynucleotide
  source 1..51: mol_type = other DNA
ctgcggggcctgtgacgtgcgggccrggcccccgagggccttatcggcccc

SEQ ID NO: 721 - DNA, 51 bp, synthetic construct
  misc_feature 1..51: note = Synthetic polynucleotide
  source 1..51: mol_type = other DNA
tcacatcctcaccaccctggaccacyggagcagccgctgcgagtacttgag

SEQ ID NO: 722 - DNA, 51 bp, synthetic construct
  misc_feature 1..51: note = Synthetic polynucleotide
  source 1..51: mol_type = other DNA
cctgtctgcagggagactaaatcctycttcaccagccagcagctgtgaccc

SEQ ID NO: 723 - DNA, 51 bp, synthetic construct
  misc_feature 1..51: note = Synthetic polynucleotide
  source 1..51: mol_type = other DNA
tattgagtagaaaacatttctcaggytgctaagctggaataaaatccactt

SEQ ID NO: 724 - DNA, 51 bp, synthetic construct
  misc_feature 1..51: note = Synthetic polynucleotide
  source 1..51: mol_type = other DNA
gctgtcaatgacctgggacatctgcytgggagagctggctttaatactctg

SEQ ID NO: 725 - DNA, 51 bp, synthetic construct
  misc_feature 1..51: note = Synthetic polynucleotide
  source 1..51: mol_type = other DNA
ttacaggaaattggccttgcctctcygggtgcacctgatgaatacattgaa

SEQ ID NO: 726 - DNA, 51 bp, synthetic construct
  misc_feature 1..51: note = Synthetic polynucleotide
  source 1..51: mol_type = other DNA
ggcctgctttcctctcgggatttctygggtggcctggccttccgagtcttc

SEQ ID NO: 727 - DNA, 51 bp, synthetic construct
  misc_feature 1..51: note = Synthetic polynucleotide
  source 1..51: mol_type = other DNA
tcactcaaagaagaagttggtgcatyggccaaagtattgcgcttatttgag

SEQ ID NO: 728 - DNA, 51 bp, synthetic construct
  misc_feature 1..51: note = Synthetic polynucleotide
  source 1..51: mol_type = other DNA
aaaggcatatggtgctgggctcctgbcatcctttggtgaattacaggtatg

SEQ ID NO: 729 - DNA, 51 bp, synthetic construct
  misc_feature 1..51: note = Synthetic polynucleotide
  source 1..51: mol_type = other DNA
gctctgacaaacatcatcaagatctygaggcatgacattggtgccactgtc

SEQ ID NO: 730 - DNA, 51 bp, synthetic construct
  misc_feature 1..51: note = Synthetic polynucleotide
  source 1..51: mol_type = other DNA
tgcactggtttccgcctccgacctghggctggcctgctttcctctcgggat

SEQ ID NO: 731 - DNA, 51 bp, synthetic construct
  misc_feature 1..51: note = Synthetic polynucleotide
  misc_difference 26: note = n is a, c, g, t or u
  source 1..51: mol_type = other DNA
gagaatgatgtaaacctgacccacantgaatctagaccttctcgtttaaag

SEQ ID NO: 732 - DNA, 51 bp, synthetic construct
  misc_feature 1..51: note = Synthetic polynucleotide
  source 1..51: mol_type = other DNA
catttggataatttctcaaaccaaaytggaaaacattataagaaagttatg

SEQ ID NO: 733 - DNA, 51 bp, synthetic construct
  misc_feature 1..51: note = Synthetic polynucleotide
  source 1..51: mol_type = other DNA
aaggccggctacgtcagcaagattgycggcaagtggtaagtctcctggcca

SEQ ID NO: 734 - DNA, 51 bp, synthetic construct
  misc_feature 1..51: note = Synthetic polynucleotide
  source 1..51: mol_type = other DNA
tcctttgactcagaagaagaagaacytggggagcttctccaacagtttgga

SEQ ID NO: 735 - DNA, 51 bp, synthetic construct
  misc_feature 1..51: note = Synthetic polynucleotide
  source 1..51: mol_type = other DNA
aatgagcaagtcccaatggaagtcaytgataatgtcatcagaacggcaggt

SEQ ID NO: 736 - DNA, 51 bp, synthetic construct
  misc_feature 1..51: note = Synthetic polynucleotide
  source 1..51: mol_type = other DNA
catttaggattctctgttgatgaccytggatgctgtaaagtgattcgtcat

SEQ ID NO: 737 - DNA, 51 bp, synthetic construct
  misc_feature 1..51: note = Synthetic polynucleotide
  source 1..51: mol_type = other DNA
aaagatgaaaagctgctgtcgtttcyaaaagatgtgtatgttgattccaaa

SEQ ID NO: 738 - DNA, 51 bp, synthetic construct
  misc_feature 1..51: note = Synthetic polynucleotide
  source 1..51: mol_type = other DNA
gcaggtgctggccctggagcggcgcytcaagcagcagcggtacctgtcagc

SEQ ID NO: 739 - DNA, 51 bp, synthetic construct
  misc_feature 1..51: note = Synthetic polynucleotide
  source 1..51: mol_type = other DNA
tatctactttggaggcctgtctggcycctttctctacacaggaggtaagat

SEQ ID NO: 740 - DNA, 51 bp, synthetic construct
  misc_feature 1..51: note = Synthetic polynucleotide
  source 1..51: mol_type = other DNA
ttgtctaaaaaggccatcggggagtycattttggtggacaaggatgtgaag

SEQ ID NO: 741 - DNA, 51 bp, synthetic construct
  misc_feature 1..51: note = Synthetic polynucleotide
  source 1..51: mol_type = other DNA
tttacagcaccaaataatctggcccygtcagcccagctgtgttcctctgga

SEQ ID NO: 742 - DNA, 51 bp, synthetic construct
  misc_feature 1..51: note = Synthetic polynucleotide
  source 1..51: mol_type = other DNA
tctttccagcctctgtttctctaccytgctctccagtctgtgcatgagccc

SEQ ID NO: 743 - DNA, 51 bp, synthetic construct
  misc_feature 1..51: note = Synthetic polynucleotide
  source 1..51: mol_type = other DNA
aaggatggccagccatttcgctacayctcaggaagcattcactactcccgt

SEQ ID NO: 744 - DNA, 51 bp, synthetic construct
  misc_feature 1..51: note = Synthetic polynucleotide
  source 1..51: mol_type = other DNA
aaggggctgtgtgtgtcttggcaggbatgtgccctggaactttcatgagcc

SEQ ID NO: 745 - DNA, 51 bp, synthetic construct
  misc_feature 1..51: note = Synthetic polynucleotide
  source 1..51: mol_type = other DNA
cctccccttctattggaatttccacygcatgctagctagtccttccctggt

SEQ ID NO: 746 - DNA, 51 bp, synthetic construct
  misc_feature 1..51: note = Synthetic polynucleotide
  source 1..51: mol_type = other DNA
cagaaattggcaccattccttaagabgtatggagaatatgtgaaaggattt

SEQ ID NO: 747 - DNA, 51 bp, synthetic construct
  misc_feature 1..51: note = Synthetic polynucleotide
  source 1..51: mol_type = other DNA
ttgggccttccctaaccagggtcctycctccttatctacctgaatgagttt

SEQ ID NO: 748 - DNA, 51 bp, synthetic construct
  misc_feature 1..51: note = Synthetic polynucleotide
  source 1..51: mol_type = other DNA
gagacgatccccagcgacagcggcaytgggacagacaacaacagcacttct

SEQ ID NO: 749 - DNA, 51 bp, synthetic construct
  misc_feature 1..51: note = Synthetic polynucleotide
  source 1..51: mol_type = other DNA
ctcctaggcgctgtcctgggctggcygatgactccccgagtgcctatggag

SEQ ID NO: 750 - DNA, 51 bp, synthetic construct
  misc_feature 1..51: note = Synthetic polynucleotide
  source 1..51: mol_type = other DNA
cttcagcattgtcatgaacgagctcyccggcagcgacaacgtgccctacgt

SEQ ID NO: 751 - DNA, 51 bp, synthetic construct
  misc_feature 1..51: note = Synthetic polynucleotide
  source 1..51: mol_type = other DNA
gaccccgagctgtgcatccggctgcyccagatgccctctgtggtcaactac

SEQ ID NO: 752 - DNA, 51 bp, synthetic construct
  misc_feature 1..51: note = Synthetic polynucleotide
  source 1..51: mol_type = other DNA
tttgaaattaagaacttcgtgaaggbaccaacctctgttattaataaaata

SEQ ID NO: 753 - DNA, 51 bp, synthetic construct
  misc_feature 1..51: note = Synthetic polynucleotide
  source 1..51: mol_type = other DNA
ccttcatcccgaatataacttcactyctcaatatcttgttcatgttaatga

SEQ ID NO: 754 - DNA, 51 bp, synthetic construct
  misc_feature 1..51: note = Synthetic polynucleotide
  source 1..51: mol_type = other DNA
cttcagccaggacttctgcatccggygcaagaggcagttttacttgtacaa

SEQ ID NO: 755 - DNA, 51 bp, synthetic construct
  misc_feature 1..51: note = Synthetic polynucleotide
  source 1..51: mol_type = other DNA
gctgcccgctgggtggccaagtctcyggtgaaagcagggctctgccggaga

SEQ ID NO: 756 - DNA, 51 bp, synthetic construct
  misc_feature 1..51: note = Synthetic polynucleotide
  source 1..51: mol_type = other DNA
aacattttgtctttcttctagttgcbagaacctgtctgtcaccagctcttt

SEQ ID NO: 757 - DNA, 51 bp, synthetic construct
  misc_feature 1..51: note = Synthetic polynucleotide
  source 1..51: mol_type = other DNA
gggtgattctttcaatacttccttaytcaaacaaacttttcaaagagtctt

SEQ ID NO: 758 - DNA, 51 bp, synthetic construct
  misc_feature 1..51: note = Synthetic polynucleotide
  source 1..51: mol_type = other DNA
ccatcaagtgtcctacgtaaaggagyattggaatgatgtgttcaggtgagt

SEQ ID NO: 759 - DNA, 51 bp, synthetic construct
  misc_feature 1..51: note = Synthetic polynucleotide
  source 1..51: mol_type = other DNA
ctgcaggtgcttcagctgctgctgcygtgtgccttcggcatgagctccctg

SEQ ID NO: 760 - DNA, 51 bp, synthetic construct
  misc_feature 1..51: note = Synthetic polynucleotide
  source 1..51: mol_type = other DNA
agtgacaggggtgcggtaccagcagycgtggctctgcatcatgtgagttgc

SEQ ID NO: 761 - DNA, 51 bp, synthetic construct
  misc_feature 1..51: note = Synthetic polynucleotide
  source 1..51: mol_type = other DNA
gccctgatggtggtggccgtgctccygggcttcgtggccatggtcctcagc

SEQ ID NO: 762 - DNA, 51 bp, synthetic construct
  misc_feature 1..51: note = Synthetic polynucleotide
  source 1..51: mol_type = other DNA
aacacagatggtcagacttttgagaytgcaatttctaaccagatgagacaa

SEQ ID NO: 763 - DNA, 51 bp, synthetic construct
  misc_feature 1..51: note = Synthetic polynucleotide
  source 1..51: mol_type = other DNA
acaggtctttactggcttattttctycaaagtgagtgagtttctgaatttt

SEQ ID NO: 764 - DNA, 51 bp, synthetic construct
  misc_feature 1..51: note = Synthetic polynucleotide
  source 1..51: mol_type = other DNA
agaacgttttgtcacttatgttggahgtgcctttgctctgaaggtaagttt

SEQ ID NO: 765 - DNA, 51 bp, synthetic construct
  misc_feature 1..51: note = Synthetic polynucleotide
  source 1..51: mol_type = other DNA
acatcttgtcaagctcttggaaataygtgtgtgatgaacatgaattcttac

SEQ ID NO: 766 - DNA, 51 bp, synthetic construct
  misc_feature 1..51: note = Synthetic polynucleotide
  source 1..51: mol_type = other DNA
ccccgtgcgcaacttgcgcctccggyagtcgcaccgccccagccccgaggc

SEQ ID NO: 767 - DNA, 51 bp, synthetic construct
  misc_feature 1..51: note = Synthetic polynucleotide
  source 1..51: mol_type = other DNA
aattacatgctcatttactttaagcytgttggactaccagcaatgccagca

SEQ ID NO: 768 - DNA, 51 bp, synthetic construct
  misc_feature 1..51: note = Synthetic polynucleotide
  source 1..51: mol_type = other DNA
atggaatggtctataactggaatgcyggagttcagtttgtttggaatacct

SEQ ID NO: 769 - DNA, 51 bp, synthetic construct
  misc_feature 1..51: note = Synthetic polynucleotide
  source 1..51: mol_type = other DNA
caccccaaccgacgccccaagatccyggcccagacagcagcccatgtagct

SEQ ID NO: 770 - DNA, 51 bp, synthetic construct
  misc_feature 1..51: note = Synthetic polynucleotide
  source 1..51: mol_type = other DNA
gcacgatcccgagactctgcttcgcygcatcgctgaaagggccttcctgag

SEQ ID NO: 771 - DNA, 51 bp, synthetic construct
  misc_feature 1..51: note = Synthetic polynucleotide
  source 1..51: mol_type = other DNA
gagaaaagcctgtttaccaaggagcytgaacatgccctggagaagaatgag

SEQ ID NO: 772 - DNA, 51 bp, synthetic construct
  misc_feature 1..51: note = Synthetic polynucleotide
  source 1..51: mol_type = other DNA
accagagggtcccctggtcgaagcaytggaatccagaaaccagttgggcat

SEQ ID NO: 773 - DNA, 51 bp, synthetic construct
  misc_feature 1..51: note = Synthetic polynucleotide
  source 1..51: mol_type = other DNA
agactccaatgtcattgtggtggacyggctgtcacgggctcaggagcatta

SEQ ID NO: 774 - DNA, 51 bp, synthetic construct
  misc_feature 1..51: note = Synthetic polynucleotide
  source 1..51: mol_type = other DNA
aacattggagaagctatccgcgtgaytgcagagagaggacttggaggtaaa

SEQ ID NO: 775 - DNA, 51 bp, synthetic construct
  misc_feature 1..51: note = Synthetic polynucleotide
  source 1..51: mol_type = other DNA
gctggggccaggccccgcggccgacytctccgtgtcggtggagcgcgctct

SEQ ID NO: 776 - DNA, 51 bp, synthetic construct
  misc_feature 1..51: note = Synthetic polynucleotide
  source 1..51: mol_type = other DNA
gcgtgtgctccgagatcttcgcatcytccggatctttgaggggacaaatga

SEQ ID NO: 777 - DNA, 51 bp, synthetic construct
  misc_feature 1..51: note = Synthetic polynucleotide
  source 1..51: mol_type = other DNA
gaaagagaatgctgtgcccacaatayttctttgtactgagccacatgacaa

SEQ ID NO: 778 - DNA, 51 bp, synthetic construct
  misc_feature 1..51: note = Synthetic polynucleotide
  source 1..51: mol_type = other DNA
agacaagagtcgtccttttattacgyccagtcctacaaatggggctgaaac

SEQ ID NO: 779 - DNA, 51 bp, synthetic construct
  misc_feature 1..51: note = Synthetic polynucleotide
  source 1..51: mol_type = other DNA
aagcagtttttgacaaatagagtgcyaaaagacccaaaacaaaggcggttt

SEQ ID NO: 780 - DNA, 51 bp, synthetic construct
  misc_feature 1..51: note = Synthetic polynucleotide
  source 1..51: mol_type = other DNA
gaaacgaaatatcgtgtcttgaagaytgatagaacagaaccaaaagatttg

SEQ ID NO: 781 - DNA, 51 bp, synthetic construct
  misc_feature 1..51: note = Synthetic polynucleotide
  source 1..51: mol_type = other DNA
gatggggacactgcctattttgcggygagtctctcctccctgccagctctc

SEQ ID NO: 782 - DNA, 51 bp, synthetic construct
  misc_feature 1..51: note = Synthetic polynucleotide
  source 1..51: mol_type = other DNA
tctaaaggcaactctagacatcgcgyccaacaaccgtaagggtatcgcctt

SEQ ID NO: 783 - DNA, 51 bp, synthetic construct
  misc_feature 1..51: note = Synthetic polynucleotide
  source 1..51: mol_type = other DNA
ggcgctgcatcacaatgagaaggagyggcaccagccggatcagttcatgcc

SEQ ID NO: 784 - DNA, 51 bp, synthetic construct
  misc_feature 1..51: note = Synthetic polynucleotide
  source 1..51: mol_type = other DNA
gagatcctggcccgccaggagctctycctcatcatggcctggctgctgcag

SEQ ID NO: 785 - DNA, 51 bp, synthetic construct
  misc_feature 1..51: note = Synthetic polynucleotide
  source 1..51: mol_type = other DNA
ggagatggtaacctgcacctcaatgygacggcggaggccttcagcccctcg

SEQ ID NO: 786 - DNA, 51 bp, synthetic construct
  misc_feature 1..51: note = Synthetic polynucleotide
  source 1..51: mol_type = other DNA
tcctaccatgtatacctttaggcccyggaccatccgccagtatgctggttt

SEQ ID NO: 787 - DNA, 51 bp, synthetic construct
  misc_feature 1..51: note = Synthetic polynucleotide
  source 1..51: mol_type = other DNA
ctgtaccagaagttcatggcctatcyttctcagggagggaaggtgttgggc

SEQ ID NO: 788 - DNA, 51 bp, synthetic construct
  misc_feature 1..51: note = Synthetic polynucleotide
  source 1..51: mol_type = other DNA
aattgccatgcaaaacaggctccccygcatctacttaggcaagtcaccaga

SEQ ID NO: 789 - DNA, 51 bp, synthetic construct
  misc_feature 1..51: note = Synthetic polynucleotide
  source 1..51: mol_type = other DNA
cattatgaccccatgattgcgaagcyggtcgtgtgggcagcagatcgccag

SEQ ID NO: 790 - DNA, 51 bp, synthetic construct
  misc_feature 1..51: note = Synthetic polynucleotide
  source 1..51: mol_type = other DNA
attgcaaagattgctgactacggcaytgctcagtactgctgtagaatgggg

SEQ ID NO: 791 - DNA, 51 bp, synthetic construct
  misc_feature 1..51: note = Synthetic polynucleotide
  source 1..51: mol_type = other DNA
gaggtgcggtacagtccgcacctgcyggccaactccaaagtggagccaatc

SEQ ID NO: 792 - DNA, 51 bp, synthetic construct
  misc_feature 1..51: note = Synthetic polynucleotide
  source 1..51: mol_type = other DNA
ctggccgcctcattcagctccctgcygacctacggcctctccctcatccgg

SEQ ID NO: 793 - DNA, 51 bp, synthetic construct
  misc_feature 1..51: note = Synthetic polynucleotide
  source 1..51: mol_type = other DNA
ccctgcacgggtggttaatgtgtccycggtggctcaccacattggcaagat

SEQ ID NO: 794 - DNA, 51 bp, synthetic construct
  misc_feature 1..51: note = Synthetic polynucleotide
  source 1..51: mol_type = other DNA
tgcctgctgctcaacctctgtgagayggcccacctgggcttgggcagcgcg

SEQ ID NO: 795 - DNA, 51 bp, synthetic construct
  misc_feature 1..51: note = Synthetic polynucleotide
  source 1..51: mol_type = other DNA
cttcggctgcctgaacaacgcccggyacggcatcgcgtggggcgtgcttgg

SEQ ID NO: 796 - DNA, 51 bp, synthetic construct
  misc_feature 1..51: note = Synthetic polynucleotide
  source 1..51: mol_type = other DNA
cggtttattgggccaagcccagaagbggtccgcaagatgggagacaaggtg

SEQ ID NO: 797 - DNA, 51 bp, synthetic construct
  misc_feature 1..51: note = Synthetic polynucleotide
  source 1..51: mol_type = other DNA
gatcctgccatgaagcagtttctgcygtacttggatgagtccaatgccctg

SEQ ID NO: 798 - DNA, 51 bp, synthetic construct
  misc_feature 1..51: note = Synthetic polynucleotide
  source 1..51: mol_type = other DNA
tcttcttccagacacagagattgacyggaaggcctacatggccgaggtaga

SEQ ID NO: 799 - DNA, 51 bp, synthetic construct
  misc_feature 1..51: note = Synthetic polynucleotide
  source 1..51: mol_type = other DNA
ggctatgatgtagtaaaggaatgccytgttcatcaaagcgaaatttttgca

SEQ ID NO: 800 - DNA, 51 bp, synthetic construct
  misc_feature 1..51: note = Synthetic polynucleotide
  source 1..51: mol_type = other DNA
ctgggccttggacccggactcgttaygaagagcgattcttcgacctctgca

SEQ ID NO: 801 - DNA, 51 bp, synthetic construct
  misc_feature 1..51: note = Synthetic polynucleotide
  source 1..51: mol_type = other DNA
cttctggaggaggcggccgacctccyggtggtgcacctggacttccgggcg

SEQ ID NO: 802 - DNA, 51 bp, synthetic construct
  misc_feature 1..51: note = Synthetic polynucleotide
  source 1..51: mol_type = other DNA
tggtcagatgatcatgtgcccactcbgtgatcaagtgtgtgattattggag

SEQ ID NO: 803 - DNA, 51 bp, synthetic construct
  misc_feature 1..51: note = Synthetic polynucleotide
  source 1..51: mol_type = other DNA
ccagctggtgcaaggtttccgggtghcttggagggtagcaggccctgaggg

SEQ ID NO: 804 - DNA, 51 bp, synthetic construct
  misc_feature 1..51: note = Synthetic polynucleotide
  source 1..51: mol_type = other DNA
ctgggtcgagccatgctgcgctaccygctgaaaacgctgctgcagatgaac

SEQ ID NO: 805 - DNA, 51 bp, synthetic construct
  misc_feature 1..51: note = Synthetic polynucleotide
  source 1..51: mol_type = other DNA
gtatgtttttctcttcctaaggtaabtttaactagttcaaagcaaattgac

SEQ ID NO: 806 - DNA, 51 bp, synthetic construct
  misc_feature 1..51: note = Synthetic polynucleotide
  source 1..51: mol_type = other DNA
gtctccagaggctgtggtccgcgaayggctggacaacattccagaagagcc

SEQ ID NO: 807 - DNA, 51 bp, synthetic construct
  misc_feature 1..51: note = Synthetic polynucleotide
  source 1..51: mol_type = other DNA
gctcgagaccagctcatctatctgcyggagcaggtcagtgcttgcctgacg

SEQ ID NO: 808 - DNA, 51 bp, synthetic construct
  misc_feature 1..51: note = Synthetic polynucleotide
  source 1..51: mol_type = other DNA
cgggattaccgcgcgctctgcgacgygggcaccgccatcagctgttcgcgc

SEQ ID NO: 809 - DNA, 51 bp, synthetic construct
  misc_feature 1..51: note = Synthetic polynucleotide
  source 1..51: mol_type = other DNA
tggcacgggccgccgcatccacagchaccgaggtacgggcccggcgcttag

SEQ ID NO: 810 - DNA, 51 bp, synthetic construct
  misc_feature 1..51: note = Synthetic polynucleotide
  source 1..51: mol_type = other DNA
caacttcgacggcgagccgcagcccyacccaacgctgccgcctggcacggg

SEQ ID NO: 811 - DNA, 51 bp, synthetic construct
  misc_feature 1..51: note = Synthetic polynucleotide
  source 1..51: mol_type = other DNA
gaggccgggcggccgcggcccgtgcygcgctcggtgaactcgcgcgagccc

SEQ ID NO: 812 - DNA, 51 bp, synthetic construct
  misc_feature 1..51: note = Synthetic polynucleotide
  source 1..51: mol_type = other DNA
gtgtatactctgaaagagcgatgccyccaggttgtccggagcctagtcaag

SEQ ID NO: 813 - DNA, 51 bp, synthetic construct
  misc_feature 1..51: note = Synthetic polynucleotide
  source 1..51: mol_type = other DNA
cccgttaccacagaagaacaggttcbggacgtcaaaggttacctatccaaa

SEQ ID NO: 814 - DNA, 51 bp, synthetic construct
  misc_feature 1..51: note = Synthetic polynucleotide
  source 1..51: mol_type = other DNA
aacatgtatgaagaaatggaaacatyagccagtgtacttcagtcagatatt

SEQ ID NO: 815 - DNA, 51 bp, synthetic construct
  misc_feature 1..51: note = Synthetic polynucleotide
  source 1..51: mol_type = other DNA
tggccggtgcacctcttggagacgcygctgccgcggcacctccagatcatc

SEQ ID NO: 816 - DNA, 51 bp, synthetic construct
  misc_feature 1..51: note = Synthetic polynucleotide
  source 1..51: mol_type = other DNA
ctttgacctgcagaacccaagagaghggacgcggatggtgatccggaacat

SEQ ID NO: 817 - DNA, 51 bp, synthetic construct
  misc_feature 1..51: note = Synthetic polynucleotide
  source 1..51: mol_type = other DNA
catgtggagatccaagctgcctacaytggcacaactataatcattcggcag

SEQ ID NO: 818 - DNA, 51 bp, synthetic construct
  misc_feature 1..51: note = Synthetic polynucleotide
  source 1..51: mol_type = other DNA
tggaggggtgggctctggcggcctcbgtcgagccctccgctcctatgcgct

SEQ ID NO: 819 - DNA, 51 bp, synthetic construct
  misc_feature 1..51: note = Synthetic polynucleotide
  source 1..51: mol_type = other DNA
accgcccgcacctgccgcggggaccycgccttccattcggcggtacatggc

SEQ ID NO: 820 - DNA, 51 bp, synthetic construct
  misc_feature 1..51: note = Synthetic polynucleotide
  source 1..51: mol_type = other DNA
gccaagtccagaaccatagggattaytggagctcctttctcaaagggacag

SEQ ID NO: 821 - DNA, 51 bp, synthetic construct
  misc_feature 1..51: note = Synthetic polynucleotide
  source 1..51: mol_type = other DNA
gccgccatgatgctgctgcagctgcyggaaggcgtggaccatctggttcaa

SEQ ID NO: 822 - DNA, 51 bp, synthetic construct
  misc_feature 1..51: note = Synthetic polynucleotide
  source 1..51: mol_type = other DNA
gccaggtacaacgccgccgccattcygaccatggagcccgtcctggggggc

SEQ ID NO: 823 - DNA, 51 bp, synthetic construct
  misc_feature 1..51: note = Synthetic polynucleotide
  source 1..51: mol_type = other DNA
ccgggtcaccaaccccatcaatcccbggtaggtcctgccactcccagctct

SEQ ID NO: 824 - DNA, 51 bp, synthetic construct
  misc_feature 1..51: note = Synthetic polynucleotide
  source 1..51: mol_type = other DNA
agtatttctgattgtcaggccaacayaatgcagatggaagaagcaaaggtt

SEQ ID NO: 825 - DNA, 51 bp, synthetic construct
  misc_feature 1..51: note = Synthetic polynucleotide
  source 1..51: mol_type = other DNA
gtcagcccttcagacagagactttayggaaacgttaaacaccctgaaatac

SEQ ID NO: 826 - DNA, 51 bp, synthetic construct
  misc_feature 1..51: note = Synthetic polynucleotide
  source 1..51: mol_type = other DNA
tcatggcggaaagagacagtccagcyatggccaggccccagtggctattca

SEQ ID NO: 827 - DNA, 51 bp, synthetic construct
  misc_feature 1..51: note = Synthetic polynucleotide
  source 1..51: mol_type = other DNA
cctcagcgatgatcatggtgcctccyggcgctacggaagtggggtcagcgg

SEQ ID NO: 828 - DNA, 51 bp, synthetic construct
  misc_feature 1..51: note = Synthetic polynucleotide
  source 1..51: mol_type = other DNA
tgatgcctacttcagtcccattcacycccagttggatcatttactggatcc

SEQ ID NO: 829 - DNA, 51 bp, synthetic construct
  misc_feature 1..51: note = Synthetic polynucleotide
  source 1..51: mol_type = other DNA
tccaaggtagagcagcttgacaagayggtgacagaaaaggcaggatttaag

SEQ ID NO: 830 - DNA, 51 bp, synthetic construct
  misc_feature 1..51: note = Synthetic polynucleotide
  source 1..51: mol_type = other DNA
cctgccttcaatagattgtttccccyggcttctctcgtgcttatctactgg

SEQ ID NO: 831 - DNA, 51 bp, synthetic construct
  misc_feature 1..51: note = Synthetic polynucleotide
  source 1..51: mol_type = other DNA
ccttcctgtatcaggagtcccaggtrtattgtttccaggtgtttatcatct

SEQ ID NO: 832 - DNA, 51 bp, synthetic construct
  misc_feature 1..51: note = Synthetic polynucleotide
  source 1..51: mol_type = other DNA
gtgggcatcttcgtggactacagaghtggaagcatctccttttacaatgtg

SEQ ID NO: 833 - DNA, 51 bp, synthetic construct
  misc_feature 1..51: note = Synthetic polynucleotide
  source 1..51: mol_type = other DNA
ggtgaaggaatctctctccagttacygggagtcagcaaagacagccgccca

SEQ ID NO: 834 - DNA, 51 bp, synthetic construct
  misc_feature 1..51: note = Synthetic polynucleotide
  source 1..51: mol_type = other DNA
ctcttctttctaaagcttgaaagaaytgctgattccaaggagcaagttttc

SEQ ID NO: 835 - DNA, 51 bp, synthetic construct
  misc_feature 1..51: note = Synthetic polynucleotide
  source 1..51: mol_type = other DNA
tcagacttctctggctccactacccygctacgtttatctgattgagcatcc

SEQ ID NO: 836 - DNA, 51 bp, synthetic construct
  misc_feature 1..51: note = Synthetic polynucleotide
  source 1..51: mol_type = other DNA
tgacttatggacgaagaaatacagtrcctgatggacataatattcaagatc

SEQ ID NO: 837 - DNA, 51 bp, synthetic construct
  misc_feature 1..51: note = Synthetic polynucleotide
  source 1..51: mol_type = other DNA
ctgctgggctctgtcaacagcttgcygaaggagctgagatgaggccccaca

SEQ ID NO: 838 - DNA, 51 bp, synthetic construct
  misc_feature 1..51: note = Synthetic polynucleotide
  source 1..51: mol_type = other DNA
tctctcaggtgacagtggggccgggygttggtctgtctctggaagacacca

SEQ ID NO: 839 - DNA, 51 bp, synthetic construct
  misc_feature 1..51: note = Synthetic polynucleotide
  source 1..51: mol_type = other DNA
agtgaagaaaggtggatcctacatgygccatagggtaagtcatgtcactaa

SEQ ID NO: 840 - DNA, 51 bp, synthetic construct
  misc_feature 1..51: note = Synthetic polynucleotide
  source 1..51: mol_type = other DNA
cttataggctgagaagtttggcgacycctttgtctttgaaggcatgttgag

SEQ ID NO: 841 - DNA, 51 bp, synthetic construct
  misc_feature 1..51: note = Synthetic polynucleotide
  source 1..51: mol_type = other DNA
tgcagatgaagaaaatcatctgaathctaaaattgcctacaagatcgtctc

SEQ ID NO: 842 - DNA, 51 bp, synthetic construct
  misc_feature 1..51: note = Synthetic polynucleotide
  source 1..51: mol_type = other DNA
cccccgcccctcctgcccaggcttcyacgtgacgctggtcgtgacccgctg

SEQ ID NO: 843 - DNA, 51 bp, synthetic construct
  misc_feature 1..51: note = Synthetic polynucleotide
  source 1..51: mol_type = other DNA
tatggcgagttcttaatcttcctgcyctgctactacatcatccgctttatt

SEQ ID NO: 844 - DNA, 51 bp, synthetic construct
  misc_feature 1..51: note = Synthetic polynucleotide
  source 1..51: mol_type = other DNA
cttggaggtcgaatccgggaccctaycctgctccagagcctgctgaacgtg

SEQ ID NO: 845 - DNA, 51 bp, synthetic construct
  misc_feature 1..51: note = Synthetic polynucleotide
  source 1..51: mol_type = other DNA
tacgactggattagtatcccactggygtatacacaggtgaggactaggctg

SEQ ID NO: 846 - DNA, 51 bp, synthetic construct
  misc_feature 1..51: note = Synthetic polynucleotide
  source 1..51: mol_type = other DNA
tgtttgttgttgttaaaaggatgttyttcgaaatttgagccacttgcctac

SEQ ID NO: 847 - DNA, 51 bp, synthetic construct
  misc_feature 1..51: note = Synthetic polynucleotide
  source 1..51: mol_type = other DNA
tataaacattttacatgcaatgtacyaccaagaatcaaaggccttggtaag

SEQ ID NO: 848 - DNA, 51 bp, synthetic construct
  misc_feature 1..51: note = Synthetic polynucleotide
  source 1..51: mol_type = other DNA
caggtgccatcttcaaacagttccaytatttatgtctggtgcacagttttg

SEQ ID NO: 849 - DNA, 51 bp, synthetic construct
  misc_feature 1..51: note = Synthetic polynucleotide
  source 1..51: mol_type = other DNA
ctcaatgttacaccactggcaagaayagtaggtaaggccaggcgaggtggc

SEQ ID NO: 850 - DNA, 51 bp, synthetic construct
  misc_feature 1..51: note = Synthetic polynucleotide
  source 1..51: mol_type = other DNA
ctcagttttcccattagcaagctccyggacttttttctgggccaggagatt

SEQ ID NO: 851 - DNA, 51 bp, synthetic construct
  misc_feature 1..51: note = Synthetic polynucleotide
  source 1..51: mol_type = other DNA
gatgacaagaacaatgatggatacaytgactatgctgaatttgcaaaatca

SEQ ID NO: 852 - DNA, 51 bp, synthetic construct
  misc_feature 1..51: note = Synthetic polynucleotide
  source 1..51: mol_type = other DNA
tgtgcccgaggaggacgggacccgcytccacagacaggtaagcacggccgt

SEQ ID NO: 853 - DNA, 51 bp, synthetic construct
  misc_feature 1..51: note = Synthetic polynucleotide
  source 1..51: mol_type = other DNA
gacttccgggacaagctgagccccaytgtgctcagcctcaatgtgtcccta

SEQ ID NO: 854 - DNA, 51 bp, synthetic construct
  misc_feature 1..51: note = Synthetic polynucleotide
  source 1..51: mol_type = other DNA
cccttccaggccggagagctggtgcytggggctcctggcggctattatttc

SEQ ID NO: 855 - DNA, 51 bp, synthetic construct
  misc_feature 1..51: note = Synthetic polynucleotide
  source 1..51: mol_type = other DNA
tccaaaagaggatttggaattgcagygtccggaggcagagacaacccccac

SEQ ID NO: 856 - DNA, 51 bp, synthetic construct
  misc_feature 1..51: note = Synthetic polynucleotide
  source 1..51: mol_type = other DNA
gcctaccatggcaacctcgagtcgcygcgtctcattgtgagccgcgggtga

SEQ ID NO: 857 - DNA, 51 bp, synthetic construct
  misc_feature 1..51: note = Synthetic polynucleotide
  source 1..51: mol_type = other DNA
gacgctctgaagaaagcccgacttayagccagtaatgtcaccgaaaccatg

SEQ ID NO: 858 - DNA, 51 bp, synthetic construct
  misc_feature 1..51: note = Synthetic polynucleotide
  source 1..51: mol_type = other DNA
tttgtccgggtcacaaccaatccagytgacctctggtcagcccccagcagc

SEQ ID NO: 859 - DNA, 51 bp, synthetic construct
  misc_feature 1..51: note = Synthetic polynucleotide
  source 1..51: mol_type = other DNA
actgaacctgttttgtgagctgacaygtagccctcgacagagtcagttttt

SEQ ID NO: 860 - DNA, 51 bp, synthetic construct
  misc_feature 1..51: note = Synthetic polynucleotide
  source 1..51: mol_type = other DNA
cgggccctgaccaccgtcacagcacytgtgaggaagttcctggggccagtg

SEQ ID NO: 861 - DNA, 51 bp, synthetic construct
  misc_feature 1..51: note = Synthetic polynucleotide
  source 1..51: mol_type = other DNA
ctcaattctcggctggcctcttactyggataaggtgcaggctctagaggag

SEQ ID NO: 862 - DNA, 51 bp, synthetic construct
  misc_feature 1..51: note = Synthetic polynucleotide
  misc_difference 26: note = n is a, c, g, t or u
  source 1..51: mol_type = other DNA
ctgactgctaatgagaagagcaccangcaggaactcaattctcggctggcc

SEQ ID NO: 863 - DNA, 51 bp, synthetic construct
  misc_feature 1..51: note = Synthetic polynucleotide
  source 1..51: mol_type = other DNA
ccagcagaccagccaattactaaacytaagaatttagaagatgttgttgtc

SEQ ID NO: 864 - DNA, 51 bp, synthetic construct
  misc_feature 1..51: note = Synthetic polynucleotide
  source 1..51: mol_type = other DNA
ggggtggggcctgagggggccttccygcccccccatcagggcttccatcga

SEQ ID NO: 865 - DNA, 51 bp, synthetic construct
  misc_feature 1..51: note = Synthetic polynucleotide
  source 1..51: mol_type = other DNA
aatgatgttagagatcatcaactccygcctgacaaattcccttcaccacaa

SEQ ID NO: 866 - DNA, 51 bp, synthetic construct
  misc_feature 1..51: note = Synthetic polynucleotide
  source 1..51: mol_type = other DNA
gaccaaactgaaatctgtaagcaggygggtaacagctgcagcatagctaac

SEQ ID NO: 867 - DNA, 51 bp, synthetic construct
  misc_feature 1..51: note = Synthetic polynucleotide
  source 1..51: mol_type = other DNA
actcatgcgatccacttggtagtctytcatgagaggagtggcaactacctc

SEQ ID NO: 868 - DNA, 51 bp, synthetic construct
  misc_feature 1..51: note = Synthetic polynucleotide
  source 1..51: mol_type = other DNA
ggcaggactaaggtggctggactcaygggacttttgaggccactgcaaaga

SEQ ID NO: 869 - DNA, 51 bp, synthetic construct
  misc_feature 1..51: note = Synthetic polynucleotide
  source 1..51: mol_type = other DNA
acattggattccattttatttctacytaataacgtgcacctttctcatcct

SEQ ID NO: 870 - DNA, 51 bp, synthetic construct
  misc_feature 1..51: note = Synthetic polynucleotide
  source 1..51: mol_type = other DNA
acgagggatgagttggagaggaggcygctgcagatgaaagaagaagcaaca

SEQ ID NO: 871 - DNA, 51 bp, synthetic construct
  misc_feature 1..51: note = Synthetic polynucleotide
  source 1..51: mol_type = other DNA
gaatacatggaaaagagcaagcatcygcaggagcagctcaatgaactcaag

SEQ ID NO: 872 - DNA, 51 bp, synthetic construct
  misc_feature 1..51: note = Synthetic polynucleotide
  source 1..51: mol_type = other DNA
ctggggctccgagaaacctggttctytggactgcagtacacaatcaaggac

SEQ ID NO: 873 - DNA, 51 bp, synthetic construct
  misc_feature 1..51: note = Synthetic polynucleotide
  source 1..51: mol_type = other DNA
agacatgaacgtagttgttgttgatyggaatcgaggagctacaactttaat

SEQ ID NO: 874 - DNA, 51 bp, synthetic construct
  misc_feature 1..51: note = Synthetic polynucleotide
  source 1..51: mol_type = other DNA
gccacgctgggggtcgccgagttctytgagtttgtgcttaagaacccccac

SEQ ID NO: 875 - DNA, 51 bp, synthetic construct
  misc_feature 1..51: note = Synthetic polynucleotide
  source 1..51: mol_type = other DNA
accctcccgcactgtcttgcagtccygctggccctcgcggcctggctgcgg

SEQ ID NO: 876 - DNA, 51 bp, synthetic construct
  misc_feature 1..51: note = Synthetic polynucleotide
  source 1..51: mol_type = other DNA
gtcccacctgatttccaggtatggtyttctaatcgaagggccaaatggaga

SEQ ID NO: 877 - DNA, 51 bp, synthetic construct
  misc_feature 1..51: note = Synthetic polynucleotide
  source 1..51: mol_type = other DNA
ctctgtccatttaggtgtgaaaccaytccagtgtaaaacttgtcagcgaaa

SEQ ID NO: 878 - DNA, 51 bp, synthetic construct
  misc_feature 1..51: note = Synthetic polynucleotide
  source 1..51: mol_type = other DNA
ccagtgtaaaacttgtcagcgaaagytctcccggtccgaccacctgaagac

SEQ ID NO: 879 - DNA, 51 bp, synthetic construct
  misc_feature 1..51: note = Synthetic polynucleotide
  source 1..51: mol_type = other DNA
gtgccaggcctccacttctacacccycaaccgcgagatggctaccacagag

SEQ ID NO: 880 - DNA, 51 bp, synthetic construct
  misc_feature 1..51: note = Synthetic polynucleotide
  source 1..51: mol_type = other DNA
tcacgcccaggaagtcgatcccaaaragtcctgaaggcttcccagacagct

SEQ ID NO: 881 - DNA, 51 bp, synthetic construct
  misc_feature 1..51: note = Synthetic polynucleotide
  source 1..51: mol_type = other DNA
cccgtggacgatgcaatcaatgggcyaagcgaggagcagaggcaggtgagg

SEQ ID NO: 882 - DNA, 51 bp, synthetic construct
  misc_feature 1..51: note = Synthetic polynucleotide
  source 1..51: mol_type = other DNA
cagttagctactgatgctgtgcagayacttggaggcaatggatttaataca

SEQ ID NO: 883 - DNA, 51 bp, synthetic construct
  misc_feature 1..51: note = Synthetic polynucleotide
  source 1..51: mol_type = other DNA
ttaggaattaaacatgggccagcgaygttcagatactagaggaattgtctt

SEQ ID NO: 884 - DNA, 51 bp, synthetic construct
  misc_feature 1..51: note = Synthetic polynucleotide
  source 1..51: mol_type = other DNA
ggaaatcatcccagtggctgcagaayatgataaaactggtgaagtaggtat

SEQ ID NO: 885 - DNA, 51 bp, synthetic construct
  misc_feature 1..51: note = Synthetic polynucleotide
  source 1..51: mol_type = other DNA
ccccgccatgaccctctcaaccctcbgtgtcctggggccatccgagccaac

SEQ ID NO: 886 - DNA, 51 bp, synthetic construct
  misc_feature 1..51: note = Synthetic polynucleotide
  source 1..51: mol_type = other DNA
ctccgtatccctatctgatagatctytgaaaacaaaggtgccatgatgggc

SEQ ID NO: 887 - DNA, 51 bp, synthetic construct
  misc_feature 1..51: note = Synthetic polynucleotide
  source 1..51: mol_type = other DNA
cccttgacaggtatgggccagcagtytcctgccagatattgcccagcgtga

SEQ ID NO: 888 - DNA, 51 bp, synthetic construct
  misc_feature 1..51: note = Synthetic polynucleotide
  source 1..51: mol_type = other DNA
actccggaccaggagcgctcactcaygttcatgcaatggggccagctgttg

SEQ ID NO: 889 - DNA, 51 bp, synthetic construct
  misc_feature 1..51: note = Synthetic polynucleotide
  source 1..51: mol_type = other DNA
ctcagccaggagattcggaacgaggyttgtctgtgccagcagacaggtggg

SEQ ID NO: 890 - DNA, 51 bp, synthetic construct
  misc_feature 1..51: note = Synthetic polynucleotide
  source 1..51: mol_type = other DNA
gactgtgcgcgccgccccctatgacyggcggctggagcccggtgagtgtct

SEQ ID NO: 891 - DNA, 51 bp, synthetic construct
  misc_feature 1..51: note = Synthetic polynucleotide
  source 1..51: mol_type = other DNA
cgctttattgatggcttcatctctcytggggctccctggggtggctccatc

SEQ ID NO: 892 - DNA, 51 bp, synthetic construct
  misc_feature 1..51: note = Synthetic polynucleotide
  source 1..51: mol_type = other DNA
caggtgccccagaccccagctgcccygaccccttccacccgctgcaggcca

SEQ ID NO: 893 - DNA, 51 bp, synthetic construct
  misc_feature 1..51: note = Synthetic polynucleotide
  source 1..51: mol_type = other DNA
ccacagacttggaacgcagtgctgcygcgctatttcaaccccacaggtgcc

SEQ ID NO: 894 - DNA, 51 bp, synthetic construct
  misc_feature 1..51: note = Synthetic polynucleotide
  source 1..51: mol_type = other DNA
acaaatctgacgaggaaaactgcggyatgggcggggccagggtgggggcgg

SEQ ID NO: 895 - DNA, 51 bp, synthetic construct
  misc_feature 1..51: note = Synthetic polynucleotide
  source 1..51: mol_type = other DNA
cagagcagtggaagcagcagagttaygtttggagcaaaacaataaaactga

SEQ ID NO: 896 - DNA, 51 bp, synthetic construct
  misc_feature 1..51: note = Synthetic polynucleotide
  source 1..51: mol_type = other DNA
gctaacatgctctttcttggccttaycagtgacaggggtcttcagaaagaa

SEQ ID NO: 897 - DNA, 51 bp, synthetic construct
  misc_feature 1..51: note = Synthetic polynucleotide
  source 1..51: mol_type = other DNA
gccttccgtcttttataataggaccygccagtgctctggcaacttcatggg

SEQ ID NO: 898 - DNA, 51 bp, synthetic construct
  misc_feature 1..51: note = Synthetic polynucleotide
  source 1..51: mol_type = other DNA
caccgcccgggccgagggcgactcabgggttctgaatggaaccaaagcctg

SEQ ID NO: 899 - DNA, 51 bp, synthetic construct
  misc_feature 1..51: note = Synthetic polynucleotide
  source 1..51: mol_type = other DNA
gcgcctcagccactcacggtttccartcagcacagagaaggtctgggggac

SEQ ID NO: 900 - DNA, 51 bp, synthetic construct
  misc_feature 1..51: note = Synthetic polynucleotide
  source 1..51: mol_type = other DNA
gccttcactgtccttgtctttcagcycctcggtgggtggtacttctacgtt

SEQ ID NO: 901 - DNA, 51 bp, synthetic construct
  misc_feature 1..51: note = Synthetic polynucleotide
  source 1..51: mol_type = other DNA
agcaggggctgttgccgaaaggctgyggagcaacaagttgacatctgacct

SEQ ID NO: 902 - DNA, 51 bp, synthetic construct
  misc_feature 1..51: note = Synthetic polynucleotide
  source 1..51: mol_type = other DNA
tggcatctggtagatgatccttcctycccatatgagagcttcacttttcca

SEQ ID NO: 903 - DNA, 51 bp, synthetic construct
  misc_feature 1..51: note = Synthetic polynucleotide
  source 1..51: mol_type = other DNA
cttgctgttggatacatctcgccatyacctgccactctctagcatcctgga

SEQ ID NO: 904 - DNA, 51 bp, synthetic construct
  misc_feature 1..51: note = Synthetic polynucleotide
  source 1..51: mol_type = other DNA
ctgggccaggtatgcgccccgcaccrgcttggccccaaaacaccagccctc

SEQ ID NO: 905 - DNA, 51 bp, synthetic construct
  misc_feature 1..51: note = Synthetic polynucleotide
  source 1..51: mol_type = other DNA
gtgttcctgctaaacagcaatgccaygggtaagctgcccgccgcccagcgc

SEQ ID NO: 906 - DNA, 51 bp, synthetic construct
  misc_feature 1..51: note = Synthetic polynucleotide
  source 1..51: mol_type = other DNA
gcggccggcgccctggagcgggccayggacgagctgctgcgccgcgcggtg

SEQ ID NO: 907 - DNA, 51 bp, synthetic construct
  misc_feature 1..51: note = Synthetic polynucleotide
  source 1..51: mol_type = other DNA
aagaactgtgataaatttgggattgytgttcatgaattgggtcatgtgata

SEQ ID NO: 908 - DNA, 51 bp, synthetic construct
  misc_feature 1..51: note = Synthetic polynucleotide
  source 1..51: mol_type = other DNA
cctgcagcggcccggacccgagaggygagaagagggaagcggaccagggaa

SEQ ID NO: 909 - DNA, 51 bp, synthetic construct
  misc_feature 1..51: note = Synthetic polynucleotide
  source 1..51: mol_type = other DNA
ccctgcagatgtacctcgaggacctygctgggaaacaatggtgggacaggt

SEQ ID NO: 910 - DNA, 51 bp, synthetic construct
  misc_feature 1..51: note = Synthetic polynucleotide
  source 1..51: mol_type = other DNA
gttgtcctacaaggagaggagcccaytgaaatacgctcaggtgtttccatt

SEQ ID NO: 911 - DNA, 51 bp, synthetic construct
  misc_feature 1..51: note = Synthetic polynucleotide
  source 1..51: mol_type = other DNA
tgcagatgaccctgatgatctgcaaygtaagcggggagaacatgttgcgct

SEQ ID NO: 912 - DNA, 51 bp, synthetic construct
  misc_feature 1..51: note = Synthetic polynucleotide
  source 1..51: mol_type = other DNA
atccctacggttgttgaatctagtcyatgatgtgactcccccagagcttgt

SEQ ID NO: 913 - DNA, 51 bp, synthetic construct
  misc_feature 1..51: note = Synthetic polynucleotide
  source 1..51: mol_type = other DNA
accgccgagtacaaggcatggctgcytgggctgctgcgccagcacggctgc

SEQ ID NO: 914 - DNA, 51 bp, synthetic construct
  misc_feature 1..51: note = Synthetic polynucleotide
  source 1..51: mol_type = other DNA
ctgcgtctccaagatcctgtgcaggyaccaggagactggctccatacgtcc

SEQ ID NO: 915 - DNA, 51 bp, synthetic construct
  misc_feature 1..51: note = Synthetic polynucleotide
  source 1..51: mol_type = other DNA
gagaccacgcgctgcttcggaaccgyggtgggcgacacgcccgcctacctc

SEQ ID NO: 916 - DNA, 51 bp, synthetic construct
  misc_feature 1..51: note = Synthetic polynucleotide
  source 1..51: mol_type = other DNA
ttcgcagtacaagctgcgcaagtccycccacctcaagaagctcaaccggta

SEQ ID NO: 917 - DNA, 51 bp, synthetic construct
  misc_feature 1..51: note = Synthetic polynucleotide
  source 1..51: mol_type = other DNA
tgtactaggccatgaactggggcacyggaagttgggacatacagtcaaaaa

SEQ ID NO: 918 - DNA, 51 bp, synthetic construct
  misc_feature 1..51: note = Synthetic polynucleotide
  source 1..51: mol_type = other DNA
gccccatgaggagtaccaggaggctyacgatgagtgcctggaggaggtgca

SEQ ID NO: 919 - DNA, 51 bp, synthetic construct
  misc_feature 1..51: note = Synthetic polynucleotide
  source 1..51: mol_type = other DNA
gggatgcatcagtgccactgcgtccvggtcgttcttctgactggcaaccag

SEQ ID NO: 920 - DNA, 51 bp, synthetic construct
  misc_feature 1..51: note = Synthetic polynucleotide
  source 1..51: mol_type = other DNA
catctaccaccagacctgggccagayactttgtgaagtaagggatcagcaa

SEQ ID NO: 921 - DNA, 51 bp, synthetic construct
  misc_feature 1..51: note = Synthetic polynucleotide
  source 1..51: mol_type = other DNA
aaattcgaaaaggggtatttgatttytgttgtacgtttcctctttggcctg

SEQ ID NO: 922 - DNA, 51 bp, synthetic construct
  misc_feature 1..51: note = Synthetic polynucleotide
  source 1..51: mol_type = other DNA
ggcttcgatgagctgcaaggtgcctytgacgagcacataggaccgctctgc

SEQ ID NO: 923 - DNA, 51 bp, synthetic construct
  misc_feature 1..51: note = Synthetic polynucleotide
  source 1..51: mol_type = other DNA
ctcatcaccacgagacctgtggcccyggagaaactgcagcacttgctggac

SEQ ID NO: 924 - DNA, 51 bp, synthetic construct
  misc_feature 1..51: note = Synthetic polynucleotide
  source 1..51: mol_type = other DNA
gagaagaccttccggatcggcttcaytgtgctggggcttttcctgctggcc

SEQ ID NO: 925 - DNA, 51 bp, synthetic construct
  misc_feature 1..51: note = Synthetic polynucleotide
  source 1..51: mol_type = other DNA
tctgttgcaggctcctgtggctgtcytgtcatgatattgtttgcctctgaa

SEQ ID NO: 926 - DNA, 51 bp, synthetic construct
  misc_feature 1..51: note = Synthetic polynucleotide
  source 1..51: mol_type = other DNA
gctgtggccagggaacaccttgaacyccttaagcatatgcacactgtgggg

SEQ ID NO: 927 - DNA, 51 bp, synthetic construct
  misc_feature 1..51: note = Synthetic polynucleotide
  source 1..51: mol_type = other DNA
ccaccagtccattcgtcagcccagaytgtcagcaaacacctggtaagtgct

SEQ ID NO: 928 - DNA, 51 bp, synthetic construct
  misc_feature 1..51: note = Synthetic polynucleotide
  source 1..51: mol_type = other DNA
atccaggtggccacagaccatgcaayacagctcaagatcgaagccctcagc

SEQ ID NO: 929 - DNA, 51 bp, synthetic construct
  misc_feature 1..51: note = Synthetic polynucleotide
  source 1..51: mol_type = other DNA
agtgcacacaactccacagagtttcycatctacgaaagaggagtcgaggtt

SEQ ID NO: 930 - DNA, 51 bp, synthetic construct
  misc_feature 1..51: note = Synthetic polynucleotide
  source 1..51: mol_type = other DNA
agcctcatcgagttcagcaccatccyggagggccgcctgggcagcaagtgg

SEQ ID NO: 931 - DNA, 51 bp, synthetic construct
  misc_feature 1..51: note = Synthetic polynucleotide
  source 1..51: mol_type = other DNA
gatcaaaggaattttatacattgacycagtcggattcaatggacggtcaca

SEQ ID NO: 932 - DNA, 51 bp, synthetic construct
  misc_feature 1..51: note = Synthetic polynucleotide
  source 1..51: mol_type = other DNA
accacttttgaagaagctcttgaaayggcatctcgtggagatagcaccaaa

SEQ ID NO: 933 - DNA, 51 bp, synthetic construct
  misc_feature 1..51: note = Synthetic polynucleotide
  source 1..51: mol_type = other DNA
tgtgcagctgctgctcgtggcagccyggagcatgggctgtggtgagtgggc

SEQ ID NO: 934 - DNA, 51 bp, synthetic construct
  misc_feature 1..51: note = Synthetic polynucleotide
  source 1..51: mol_type = other DNA
ggtgacccgctcctgctccagctccygtgtggccaccgaccccgacagcat

SEQ ID NO: 935 - DNA, 51 bp, synthetic construct
  misc_feature 1..51: note = Synthetic polynucleotide
  source 1..51: mol_type = other DNA
cttcgggaggaggtgctaggagaacbgtcaaatgtggagcaagcagctggc

SEQ ID NO: 936 - DNA, 51 bp, synthetic construct
  misc_feature 1..51: note = Synthetic polynucleotide
  source 1..51: mol_type = other DNA
ccggactctgggatcggcggcgctaygagttctttcgaggggcagatggcc

SEQ ID NO: 937 - DNA, 51 bp, synthetic construct
  misc_feature 1..51: note = Synthetic polynucleotide
  source 1..51: mol_type = other DNA
cagatacaggaggcccgagccgactyagcccgcagggggctgcgcttctga

SEQ ID NO: 938 - DNA, 51 bp, synthetic construct
  misc_feature 1..51: note = Synthetic polynucleotide
  source 1..51: mol_type = other DNA
gccttccaagtgctggtctcacagcyaaagattgtcctcaatgtttcaacc

SEQ ID NO: 939 - DNA, 51 bp, synthetic construct
  misc_feature 1..51: note = Synthetic polynucleotide
  source 1..51: mol_type = other DNA
tggaagcatccctagcacagatatcyacaaaagtaccaagaattacaaaaa

SEQ ID NO: 940 - DNA, 51 bp, synthetic construct
  misc_feature 1..51: note = Synthetic polynucleotide
  source 1..51: mol_type = other DNA
ctttcccttcgaccaaggtgtctgtygctccgtaaataaaacgtcccactg

SEQ ID NO: 941 - DNA, 51 bp, synthetic construct
  misc_feature 1..51: note = Synthetic polynucleotide
  source 1..51: mol_type = other DNA
atttttcacttaaaaactcactagghttttgcctcctgaacttccacctgt

SEQ ID NO: 942 - DNA, 51 bp, synthetic construct
  misc_feature 1..51: note = Synthetic polynucleotide
  source 1..51: mol_type = other DNA
aacaaagatttttttaatatgtttcyatcctgtgtcacagtttgaaattgt

SEQ ID NO: 943 - DNA, 51 bp, synthetic construct
  misc_feature 1..51: note = Synthetic polynucleotide
  source 1..51: mol_type = other DNA
aaagctgagcaacatgacagcacaayagaggaggaacaaagatttttttaa

SEQ ID NO: 944 - DNA, 51 bp, synthetic construct
  misc_feature 1..51: note = Synthetic polynucleotide
  source 1..51: mol_type = other DNA
gcgaccaccgggagatcacgaaaggyaccgcgggcctcgcgcgggcgccct

SEQ ID NO: 945 - DNA, 51 bp, synthetic construct
  misc_feature 1..51: note = Synthetic polynucleotide
  source 1..51: mol_type = other DNA
agtggctgcaatgcacgcctcacctycaacatcactgcgggcaaccgcgag

SEQ ID NO: 946 - DNA, 51 bp, synthetic construct
  misc_feature 1..51: note = Synthetic polynucleotide
  source 1..51: mol_type = other DNA
gtggacgtacttgctgagcctcatcytcaaggccgccgtggatgctggctt

SEQ ID NO: 947 - DNA, 51 bp, synthetic construct
  misc_feature 1..51: note = Synthetic polynucleotide
  source 1..51: mol_type = other DNA
ttttggccgaggtccgctgtatccayggctctcctgaccaatctactgccc

SEQ ID NO: 948 - DNA, 51 bp, synthetic construct
  misc_feature 1..51: note = Synthetic polynucleotide
  source 1..51: mol_type = other DNA
cgcgaccgcaacaagtatgggttgcyggcgcgcctcgcagtggaagccggc

SEQ ID NO: 949 - DNA, 51 bp, synthetic construct
  misc_feature 1..51: note = Synthetic polynucleotide
  source 1..51: mol_type = other DNA
gtgatgagcagaagatacctctgcayggatttcagaggcaacatttttgga

SEQ ID NO: 950 - DNA, 51 bp, synthetic construct
  misc_feature 1..51: note = Synthetic polynucleotide
  source 1..51: mol_type = other DNA
tgctatgcagctatgaaaaagaaaayctacgccatgggtggaggctcctac

SEQ ID NO: 951 - DNA, 51 bp, synthetic construct
  misc_feature 1..51: note = Synthetic polynucleotide
  source 1..51: mol_type = other DNA
cagtggggggcggctgctctcagctycacccgtggatgctgctatccgggt

SEQ ID NO: 952 - DNA, 51 bp, synthetic construct
  misc_feature 1..51: note = Synthetic polynucleotide
  source 1..51: mol_type = other DNA
taccgcctggtgcgcttcgaggaccyggcgcgggagccgctggcagaaatc

SEQ ID NO: 953 - DNA, 51 bp, synthetic construct
  misc_feature 1..51: note = Synthetic polynucleotide
  source 1..51: mol_type = other DNA
gtggcggaagtctatctcgtccatcyccatgccagtgtgtacgcactcttt

SEQ ID NO: 954 - DNA, 51 bp, synthetic construct
  misc_feature 1..51: note = Synthetic polynucleotide
  source 1..51: mol_type = other DNA
ccctggccgctgctaccgcgtcaccyggttcacctcctggagcccctgcta

SEQ ID NO: 955 - DNA, 51 bp, synthetic construct
  misc_feature 1..51: note = Synthetic polynucleotide
  source 1..51: mol_type = other DNA
ctgcgagggaaccccaacctcagtcygaggatcttcaccgcgcgcctctac

SEQ ID NO: 956 - DNA, 51 bp, synthetic construct
  misc_feature 1..51: note = Synthetic polynucleotide
  source 1..51: mol_type = other DNA
gattatttttactgctggaatacttytgtagaaaaccacgaaagaactttc

SEQ ID NO: 957 - DNA, 51 bp, synthetic construct
  misc_feature 1..51: note = Synthetic polynucleotide
  source 1..51: mol_type = other DNA
atcattctgcaatttatccctgagaygatttttatcctgtgtctgtttgga

SEQ ID NO: 958 - DNA, 51 bp, synthetic construct
  misc_feature 1..51: note = Synthetic polynucleotide
  source 1..51: mol_type = other DNA
gctgtcaaggaggatgcagtcgagaygctggccagctacgggctggcgtac

SEQ ID NO: 959 - DNA, 51 bp, synthetic construct
  misc_feature 1..51: note = Synthetic polynucleotide
  source 1..51: mol_type = other DNA
tgtttgatgtctttctccccagctcygtttcgtgatgttttggacacccaa

SEQ ID NO: 960 - DNA, 51 bp, synthetic construct
  misc_feature 1..51: note = Synthetic polynucleotide
  source 1..51: mol_type = other DNA
gtgagggcgcatctcaccgggtggcygatgacactgaagaaaaccttcgtc

SEQ ID NO: 961 - DNA, 51 bp, synthetic construct
  misc_feature 1..51: note = Synthetic polynucleotide
  source 1..51: mol_type = other DNA
acaaaaaacgactattgggcgatgcyggcttataacaggtccaagctctgc

SEQ ID NO: 962 - DNA, 51 bp, synthetic construct
  misc_feature 1..51: note = Synthetic polynucleotide
  source 1..51: mol_type = other DNA
cagcggattcctctgtcccaagtggyaggttcttaaagagacccgcgatgg

SEQ ID NO: 963 - DNA, 51 bp, synthetic construct
  misc_feature 1..51: note = Synthetic polynucleotide
  source 1..51: mol_type = other DNA
gacgggcgcactagcagcagggcgcyggtgcctggcggttcccctaggggc

SEQ ID NO: 964 - DNA, 51 bp, synthetic construct
  misc_feature 1..51: note = Synthetic polynucleotide
  source 1..51: mol_type = other DNA
gaaaaggaactgggacttaccaagcygctggatcccgaaggtggggccaga

SEQ ID NO: 965 - DNA, 51 bp, synthetic construct
  misc_feature 1..51: note = Synthetic polynucleotide
  source 1..51: mol_type = other DNA
gcaccctaagcaatgtgcatacttcygtgagaacaagctcaggagcccagt

SEQ ID NO: 966 - DNA, 51 bp, synthetic construct
  misc_feature 1..51: note = Synthetic polynucleotide
  source 1..51: mol_type = other DNA
gaaaatgcagtcttggaccagctgcytaacctaggaaggcagctaatcagt

SEQ ID NO: 967 - DNA, 51 bp, synthetic construct
  misc_feature 1..51: note = Synthetic polynucleotide
  source 1..51: mol_type = other DNA
aatggcgtgtcatccacccaggaccrgtccccttccatccctgctttagtc

SEQ ID NO: 968 - DNA, 51 bp, synthetic construct
  misc_feature 1..51: note = Synthetic polynucleotide
  source 1..51: mol_type = other DNA
tgtggaaaagaaggagagagaatacyctgaacagctaatcgataatgtgcg

SEQ ID NO: 969 - DNA, 51 bp, synthetic construct
  misc_feature 1..51: note = Synthetic polynucleotide
  source 1..51: mol_type = other DNA
aaattttgcccaccgctctgtaccayggagaagtttgcttcctactgcctc

SEQ ID NO: 970 - DNA, 51 bp, synthetic construct
  misc_feature 1..51: note = Synthetic polynucleotide
  source 1..51: mol_type = other DNA
cgagaaggccataatgacctatgtgyccagcttctaccatgccttttcagg

SEQ ID NO: 971 - DNA, 51 bp, synthetic construct
  misc_feature 1..51: note = Synthetic polynucleotide
  source 1..51: mol_type = other DNA
agcgaagccaaaatgccctgccgtgygtacttgtaccaaagataatgcttt

SEQ ID NO: 972 - DNA, 51 bp, synthetic construct
  misc_feature 1..51: note = Synthetic polynucleotide
  source 1..51: mol_type = other DNA
gcagaatttgcaaagtctcaagaccygccttatcaatcattgtccatagac

SEQ ID NO: 973 - DNA, 51 bp, synthetic construct
  misc_feature 1..51: note = Synthetic polynucleotide
  source 1..51: mol_type = other DNA
gcaaacctgcgtcaacacctacggcyctttcatctgccgctgtgacccagg

SEQ ID NO: 974 - DNA, 51 bp, synthetic construct
  misc_feature 1..51: note = Synthetic polynucleotide
  source 1..51: mol_type = other DNA
ttgcttgcatttctgtttccagacaytgatgaatgtcgctatggttactgc

SEQ ID NO: 975 - DNA, 51 bp, synthetic construct
  misc_feature 1..51: note = Synthetic polynucleotide
  source 1..51: mol_type = other DNA
gttttctgtattggtgtgttttgtaycttgcttgaacttcctgttcttctt

SEQ ID NO: 976 - DNA, 51 bp, synthetic construct
  misc_feature 1..51: note = Synthetic polynucleotide
  source 1..51: mol_type = other DNA
gagctagcctcctatgatatgcggcygaggtaggtggtctgggtggggtga

SEQ ID NO: 977 - DNA, 51 bp, synthetic construct
  misc_feature 1..51: note = Synthetic polynucleotide
  source 1..51: mol_type = other DNA
aatggattatacttactatgcagtayggcccgatcctgatttagttcatga

SEQ ID NO: 978 - DNA, 51 bp, synthetic construct
  misc_feature 1..51: note = Synthetic polynucleotide
  source 1..51: mol_type = other DNA
aagtgagtcttggcttaagaatgcayggcattttattagtgaatctgtaag

SEQ ID NO: 979 - DNA, 51 bp, synthetic construct
  misc_feature 1..51: note = Synthetic polynucleotide
  source 1..51: mol_type = other DNA
cagatggtatcagctggtgaactctytgaccctgatatagaagtactaaag

SEQ ID NO: 980 - DNA, 51 bp, synthetic construct
  misc_feature 1..51: note = Synthetic polynucleotide
  source 1..51: mol_type = other DNA
gagccgcttgggccggggcaagcgcycgctagtgctggacctgaagcagcc

SEQ ID NO: 981 - DNA, 51 bp, synthetic construct
  misc_feature 1..51: note = Synthetic polynucleotide
  source 1..51: mol_type = other DNA
aatccaaggcttatttatgccaggcygagtggatttggccagtcaggaagc

SEQ ID NO: 982 - DNA, 51 bp, synthetic construct
  misc_feature 1..51: note = Synthetic polynucleotide
  source 1..51: mol_type = other DNA
gacagaggaacaaaggagactcttayggtcagtaccaccatgagaatgtga

SEQ ID NO: 983 - DNA, 51 bp, synthetic construct
  misc_feature 1..51: note = Synthetic polynucleotide
  source 1..51: mol_type = other DNA
tactctgatcctcaactactgccagygcctgctgaagaaggaggagtacta

SEQ ID NO: 984 - DNA, 51 bp, synthetic construct
  misc_feature 1..51: note = Synthetic polynucleotide
  source 1..51: mol_type = other DNA
ctctcatttgctttagccagtcgtcygggattgtattccaaaacttcccag

SEQ ID NO: 985 - DNA, 51 bp, synthetic construct
  misc_feature 1..51: note = Synthetic polynucleotide
  source 1..51: mol_type = other DNA
gaagtgggtcctaaaaactcttacaytgcatacatagaagatcacagtggc

SEQ ID NO: 986 - DNA, 51 bp, synthetic construct
  misc_feature 1..51: note = Synthetic polynucleotide
  source 1..51: mol_type = other DNA
acctatgtcggcggcatcctgctgcyctccaagcagcactaccggctggtg

SEQ ID NO: 987 - DNA, 51 bp, synthetic construct
  misc_feature 1..51: note = Synthetic polynucleotide
  source 1..51: mol_type = other DNA
atctacaggcatcgacatcctgtacycgggctcccagaaggccctgaacgc

SEQ ID NO: 988 - DNA, 51 bp, synthetic construct
  misc_feature 1..51: note = Synthetic polynucleotide
  source 1..51: mol_type = other DNA
aagcccttctccttctacctggacaycaagtggctggccaacttctggggc

SEQ ID NO: 989 - DNA, 51 bp, synthetic construct
  misc_feature 1..51: note = Synthetic polynucleotide
  source 1..51: mol_type = other DNA
acatggcacgaagtgaccctttccaygacagacccactgtcccagacctcc

SEQ ID NO: 990 - DNA, 51 bp, synthetic construct
  misc_feature 1..51: note = Synthetic polynucleotide
  source 1..51: mol_type = other DNA
acactgtgaactcaacatcgatgaaygcttttcaaacccctgtatccatgg

SEQ ID NO: 991 - DNA, 51 bp, synthetic construct
  misc_feature 1..51: note = Synthetic polynucleotide
  source 1..51: mol_type = other DNA
agataaactgttctacatctacacayccggcaccacagggctgcccaaggc

SEQ ID NO: 992 - DNA, 51 bp, synthetic construct
  misc_feature 1..51: note = Synthetic polynucleotide
  source 1..51: mol_type = other DNA
cgctggtacgtgacggtgttcccgtygcgcgccctgcaccgccgcacgccc

SEQ ID NO: 993 - DNA, 51 bp, synthetic construct
  misc_feature 1..51: note = Synthetic polynucleotide
  source 1..51: mol_type = other DNA
tgctgcgtccccttcacggccctgcygtacccgctgcccggctgggtgctg

SEQ ID NO: 994 - DNA, 51 bp, synthetic construct
  misc_feature 1..51: note = Synthetic polynucleotide
  source 1..51: mol_type = other DNA
atctccatcatcgtgggcaccatcaytggctctgggatcttcgtttccccc

SEQ ID NO: 995 - DNA, 51 bp, synthetic construct
  misc_feature 1..51: note = Synthetic polynucleotide
  source 1..51: mol_type = other DNA
tggtgtccagcagcatccggcttcayggggggacttgaaccctgcagcagg

SEQ ID NO: 996 - DNA, 51 bp, synthetic construct
  misc_feature 1..51: note = Synthetic polynucleotide
  source 1..51: mol_type = other DNA
caggagggcaaggtgcagtttgtgaytgatgcggtgtacgccattgcccac

SEQ ID NO: 997 - DNA, 51 bp, synthetic construct
  misc_feature 1..51: note = Synthetic polynucleotide
  source 1..51: mol_type = other DNA
gttttccaaaggaggctaccagataygcaggcgtcacaaagactgtgaggg

SEQ ID NO: 998 - DNA, 51 bp, synthetic construct
  misc_feature 1..51: note = Synthetic polynucleotide
  source 1..51: mol_type = other DNA
cccaaccaagatgcgagtggaacgaygggccttcaacttcagcgaattgat

SEQ ID NO: 999 - DNA, 51 bp, synthetic construct
  misc_feature 1..51: note = Synthetic polynucleotide
  source 1..51: mol_type = other DNA
ctccagacgatcaccatctgcttccyggtcatgcactacagaggacagact

SEQ ID NO: 1000 - DNA, 51 bp, synthetic construct
  misc_feature 1..51: note = Synthetic polynucleotide
  source 1..51: mol_type = other DNA
actggcggaagctagctttgcaatayggcggccgaggcggacggaccgctt

SEQ ID NO: 1001 - DNA, 51 bp, synthetic construct
  misc_feature 1..51: note = Synthetic polynucleotide
  source 1..51: mol_type = other DNA
ctgggagccaagagtgctgaagggtygagtctccagtctgtaatgctggag

SEQ ID NO: 1002 - DNA, 51 bp, synthetic construct
  misc_feature 1..51: note = Synthetic polynucleotide
  source 1..51: mol_type = other DNA
acgctgaacatgctcatcaagatcaytggcaattcagtgggggcgctgggt

SEQ ID NO: 1003 - DNA, 51 bp, synthetic construct
  misc_feature 1..51: note = Synthetic polynucleotide
  source 1..51: mol_type = other DNA
gctgggtttggatttctcaccctgcyccttggtcttgactgcgtgaaattc

SEQ ID NO: 1004 - DNA, 51 bp, synthetic construct
  misc_feature 1..51: note = Synthetic polynucleotide
  source 1..51: mol_type = other DNA
atatgccctggtcttccagtgaagcyggtggtaactcgagcgttgatgatt

SEQ ID NO: 1005 - DNA, 51 bp, synthetic construct
  misc_feature 1..51: note = Synthetic polynucleotide
  source 1..51: mol_type = other DNA
ctttcttccatagctgctaaaggccyggagccctgtttttaggaactacat

SEQ ID NO: 1006 - DNA, 51 bp, synthetic construct
  misc_feature 1..51: note = Synthetic polynucleotide
  source 1..51: mol_type = other DNA
tattgtgaaaacccagatatagtgcygtgtggaaacaagagtgatctggag

SEQ ID NO: 1007 - DNA, 51 bp, synthetic construct
  misc_feature 1..51: note = Synthetic polynucleotide
  source 1..51: mol_type = other DNA
cccgccctgctgggtgctgccagcayggttctggactacacaacacgcagg

SEQ ID NO: 1008 - DNA, 51 bp, synthetic construct
  misc_feature 1..51: note = Synthetic polynucleotide
  source 1..51: mol_type = other DNA
cgctgcggccccctcaacgtgacgcyggccgcagaggcctgccgccgcaag

SEQ ID NO: 1009 - DNA, 51 bp, synthetic construct
  misc_feature 1..51: note = Synthetic polynucleotide
  source 1..51: mol_type = other DNA
ctggtgcgcgacccccgggccgtgcyggcctcgcgcatggtggccttcgcc

SEQ ID NO: 1010 - DNA, 51 bp, synthetic construct
  misc_feature 1..51: note = Synthetic polynucleotide
  source 1..51: mol_type = other DNA
cggcagctggagttcctgcagccgcyggccgaggacccccgcctggacctg

SEQ ID NO: 1011 - DNA, 51 bp, synthetic construct
  misc_feature 1..51: note = Synthetic polynucleotide
  source 1..51: mol_type = other DNA
ttctactatgtcatcctgtacctcayggtgatgattggaatgttctctttc

SEQ ID NO: 1012 - DNA, 51 bp, synthetic construct
  misc_feature 1..51: note = Synthetic polynucleotide
  source 1..51: mol_type = other DNA
gtcatcctgtacctcatggtgatgaytggaatgttctctttcatcatcgtg

SEQ ID NO: 1013 - DNA, 51 bp, synthetic construct
  misc_feature 1..51: note = Synthetic polynucleotide
  source 1..51: mol_type = other DNA
gtacctcatggtgatgattggaatghtctctttcatcatcgtggccatcct

SEQ ID NO: 1014 - DNA, 51 bp, synthetic construct
  misc_feature 1..51: note = Synthetic polynucleotide
  source 1..51: mol_type = other DNA
tcatcctccttgctctccccacagcycctcatcccccatacccgatacacc

SEQ ID NO: 1015 - DNA, 51 bp, synthetic construct
  misc_feature 1..51: note = Synthetic polynucleotide
  source 1..51: mol_type = other DNA
attcggaagtggttggacaagtaagygccattgtactgtttgcgactagtt

SEQ ID NO: 1016 - DNA, 51 bp, synthetic construct
  misc_feature 1..51: note = Synthetic polynucleotide
  source 1..51: mol_type = other DNA
gccaccggcctcactcccacacaagyaggcaactggtttaagaaccggcgg

SEQ ID NO: 1017 - DNA, 51 bp, synthetic construct
  misc_feature 1..51: note = Synthetic polynucleotide
  source 1..51: mol_type = other DNA
tttattagtgagctaagagatgattytttaaaatttgatgacaagtttgca

SEQ ID NO: 1018 - DNA, 51 bp, synthetic construct
  misc_feature 1..51: note = Synthetic polynucleotide
  source 1..51: mol_type = other DNA
ctgtgtcccacctgggaccagatgcyggtgttcgacaacctggagctctat

SEQ ID NO: 1019 - DNA, 51 bp, synthetic construct
  misc_feature 1..51: note = Synthetic polynucleotide
  source 1..51: mol_type = other DNA
gacgtggccatcggcacccacttcaytgacctgcgcaagatttctaatgac

SEQ ID NO: 1020 - DNA, 51 bp, synthetic construct
  misc_feature 1..51: note = Synthetic polynucleotide
  source 1..51: mol_type = other DNA
gatgctggaggccatctgcaagcacygggaggggcccatcagcctggccct

SEQ ID NO: 1021 - DNA, 51 bp, synthetic construct
  misc_feature 1..51: note = Synthetic polynucleotide
  source 1..51: mol_type = other DNA
gaggcctccatgcacagatattaagrgcttggggagttccagctgccaatc

SEQ ID NO: 1022 - DNA, 51 bp, synthetic construct
  misc_feature 1..51: note = Synthetic polynucleotide
  source 1..51: mol_type = other DNA
acctgtttgtgtctccagattacatygacaaccatcggctatggtgacaag

SEQ ID NO: 1023 - DNA, 51 bp, synthetic construct
  misc_feature 1..51: note = Synthetic polynucleotide
  source 1..51: mol_type = other DNA
actgaaccaccttttcccccacagcygtaccttccttggaaagagagtaga

SEQ ID NO: 1024 - DNA, 51 bp, synthetic construct
  misc_feature 1..51: note = Synthetic polynucleotide
  source 1..51: mol_type = other DNA
cgctcgtgcctgcgttcgctgcgccycctcgtcttcgccgtcttctcagcc

SEQ ID NO: 1025 - DNA, 51 bp, synthetic construct
  misc_feature 1..51: note = Synthetic polynucleotide
  source 1..51: mol_type = other DNA
catcccggtcactcccaagaacccgyggagcatggatgagaacctcatgca

SEQ ID NO: 1026 - DNA, 51 bp, synthetic construct
  misc_feature 1..51: note = Synthetic polynucleotide
  source 1..51: mol_type = other DNA
acattgaacatgctgattaagatcaytggtaactcagtaggggctctaggt

SEQ ID NO: 1027 - DNA, 51 bp, synthetic construct
  misc_feature 1..51: note = Synthetic polynucleotide
  source 1..51: mol_type = other DNA
tttctttaccttggaggtcaagacayctttatgacagaagaacagaagaaa

SEQ ID NO: 1028 - DNA, 51 bp, synthetic construct
  misc_feature 1..51: note = Synthetic polynucleotide
  source 1..51: mol_type = other DNA
ggcaatgtttcagctcttcgaacttycagagtattgagagctttgaaaact

SEQ ID NO: 1029 - DNA, 51 bp, synthetic construct
  misc_feature 1..51: note = Synthetic polynucleotide
  source 1..51: mol_type = other DNA
agatggctgtggatgctgtaaaatcygtgccaagcaaccaggggaaatctg

SEQ ID NO: 1030 - DNA, 51 bp, synthetic construct
  misc_feature 1..51: note = Synthetic polynucleotide
  source 1..51: mol_type = other DNA
taaatggaagatgctgtggattacaycttgtgtgtgtcagagaaactgcag

SEQ ID NO: 1031 - DNA, 51 bp, synthetic construct
  misc_feature 1..51: note = Synthetic polynucleotide
  source 1..51: mol_type = other DNA
cgagcactcagttatgacttacctgycccagttccccaaagccaagctcaa

SEQ ID NO: 1032 - DNA, 51 bp, synthetic construct
  misc_feature 1..51: note = Synthetic polynucleotide
  misc_difference 26: note = n is a, c, g, t or u
  source 1..51: mol_type = other DNA
gatttgttactgacaaggcctagggnaagttttcacagcctaaaacacagt

SEQ ID NO: 1033 - DNA, 51 bp, synthetic construct
  misc_feature 1..51: note = Synthetic polynucleotide
  source 1..51: mol_type = other DNA
tacaagacctaagttccaagaagcarcagtcccacaacattctggatctgc

SEQ ID NO: 1034 - DNA, 51 bp, synthetic construct
  misc_feature 1..51: note = Synthetic polynucleotide
  source 1..51: mol_type = other DNA
ggtcaccatcatgtccataatgctgyggtatgtaaaagagacctgcctgag

SEQ ID NO: 1035 - DNA, 51 bp, synthetic construct
  misc_feature 1..51: note = Synthetic polynucleotide
  source 1..51: mol_type = other DNA
atgcctcagacaaaattcaaagcctrtgtcatcagagagtgaaaaggatat

SEQ ID NO: 1036 - DNA, 51 bp, synthetic construct
  misc_feature 1..51: note = Synthetic polynucleotide
  source 1..51: mol_type = other DNA
ggctgttgtgggaaatatggactctygtggggaatctctccagatcttaag

SEQ ID NO: 1037 - DNA, 51 bp, synthetic construct
  misc_feature 1..51: note = Synthetic polynucleotide
  source 1..51: mol_type = other DNA
tgccaagaggatggctgtgttgatcytcaccgacttcatatgcatggcccc

SEQ ID NO: 1038 - DNA, 51 bp, synthetic construct
  misc_feature 1..51: note = Synthetic polynucleotide
  source 1..51: mol_type = other DNA
aaactgaacgtcccccgctttctcaygtgcaacctggcctttgcggatttc

SEQ ID NO: 1039 - DNA, 51 bp, synthetic construct
  misc_feature 1..51: note = Synthetic polynucleotide
  source 1..51: mol_type = other DNA
actgtctttgcaagcgagttatcggygtatacgctgacggtcatcaccctg

SEQ ID NO: 1040 - DNA, 51 bp, synthetic construct
  misc_feature 1..51: note = Synthetic polynucleotide
  source 1..51: mol_type = other DNA
agttgccttcgtcatcgtctgctgcygttatgtgaagatctacatcacagt

SEQ ID NO: 1041 - DNA, 51 bp, synthetic construct
  misc_feature 1..51: note = Synthetic polynucleotide
  source 1..51: mol_type = other DNA
gcggatttctgcatggggatgtaccygctcctcatcgcctctgtagacctc

SEQ ID NO: 1042 - DNA, 51 bp, synthetic construct
  misc_feature 1..51: note = Synthetic polynucleotide
  source 1..51: mol_type = other DNA
cagaaatgtttgcaacacaaggacaytcctgtccccaagggctttctgact

SEQ ID NO: 1043 - DNA, 51 bp, synthetic construct
  misc_feature 1..51: note = Synthetic polynucleotide
  source 1..51: mol_type = other DNA
tccgtggtgttcgtcttccgggtgcyggtatacgtggtggctgcagagcgc

SEQ ID NO: 1044 - DNA, 51 bp, synthetic construct
  misc_feature 1..51: note = Synthetic polynucleotide
  source 1..51: mol_type = other DNA
gatttgctcagagtagctgatacaaytgtagccaaagctgccgaccttaaa

SEQ ID NO: 1045 - DNA, 51 bp, synthetic construct
  misc_feature 1..51: note = Synthetic polynucleotide
  source 1..51: mol_type = other DNA
ctggctctatgagagacttgcacctyaactctgggacctgctggcccagag

SEQ ID NO: 1046 - DNA, 51 bp, synthetic construct
  misc_feature 1..51: note = Synthetic polynucleotide
  source 1..51: mol_type = other DNA
ccgacgctgctttgaggcccggatcygtgcttgcccaggaagagacaggaa

SEQ ID NO: 1047 - DNA, 51 bp, synthetic construct
  misc_feature 1..51: note = Synthetic polynucleotide
  source 1..51: mol_type = other DNA
cctccgtatcccacagattgcagcaytgtcaggtgagtccacagcatgtgc

SEQ ID NO: 1048 - DNA, 51 bp, synthetic construct
  misc_feature 1..51: note = Synthetic polynucleotide
  source 1..51: mol_type = other DNA
caccatctatcagattgagcattacbccatggatgtaagtaactgttagac

SEQ ID NO: 1049 - DNA, 51 bp, synthetic construct
  misc_feature 1..51: note = Synthetic polynucleotide
  source 1..51: mol_type = other DNA
catccagtctcaaatgctttctagayggtctgcttctttcacagtaactag

SEQ ID NO: 1050 - DNA, 51 bp, synthetic construct
  misc_feature 1..51: note = Synthetic polynucleotide
  source 1..51: mol_type = other DNA
gcacctctggatgacctgaaagatayggcttctaaaccgaaggagtctcat

SEQ ID NO: 1051 - DNA, 51 bp, synthetic construct
  misc_feature 1..51: note = Synthetic polynucleotide
  source 1..51: mol_type = other DNA
acaggaacagtcacagtgcaggtgcyggaagccatccccaccagcggcctc

SEQ ID NO: 1052 - DNA, 51 bp, synthetic construct
  misc_feature 1..51: note = Synthetic polynucleotide
  source 1..51: mol_type = other DNA
aatcagctaagtgtagccacattacygtttgagggggatcgtgagaaggtt

SEQ ID NO: 1053 - DNA, 51 bp, synthetic construct
  misc_feature 1..51: note = Synthetic polynucleotide
  source 1..51: mol_type = other DNA
gggagagtttggggtgtacctggtgyctgatggcagcagccgcccttatcg

SEQ ID NO: 1054 - DNA, 51 bp, synthetic construct
  misc_feature 1..51: note = Synthetic polynucleotide
  source 1..51: mol_type = other DNA
ccagtggtttggcgatggcaagttcyccgaggtgagtccggggaagggcaa

SEQ ID NO: 1055 - DNA, 51 bp, synthetic construct
  misc_feature 1..51: note = Synthetic polynucleotide
  source 1..51: mol_type = other DNA
caaatatatgccctctgcaaccaatyttatacacctgcagctactggactc

SEQ ID NO: 1056 - DNA, 51 bp, synthetic construct
  misc_feature 1..51: note = Synthetic polynucleotide
  source 1..51: mol_type = other DNA
aatgatgaggccacagtgtctgttcytggggagcttgcagcagaaatgaat

SEQ ID NO: 1057 - DNA, 51 bp, synthetic construct
  misc_feature 1..51: note = Synthetic polynucleotide
  source 1..51: mol_type = other DNA
acagaatcttgctgctgagaaaacayacaataacctagatatcacggtgac

SEQ ID NO: 1058 - DNA, 51 bp, synthetic construct
  misc_feature 1..51: note = Synthetic polynucleotide
  source 1..51: mol_type = other DNA
tagtattgtgggtattatttccctgycggacattctgcaagccctgatcct

SEQ ID NO: 1059 - DNA, 51 bp, synthetic construct
  misc_feature 1..51: note = Synthetic polynucleotide
  source 1..51: mol_type = other DNA
ttcaagctgttccgggccctgggccygcggcacctggtggtggtggacaac

SEQ ID NO: 1060 - DNA, 51 bp, synthetic construct
  misc_feature 1..51: note = Synthetic polynucleotide
  source 1..51: mol_type = other DNA
ggcaggacagagcttggagctgccgygcgtggcccgagggggtaatccctt

SEQ ID NO: 1061 - DNA, 51 bp, synthetic construct
  misc_feature 1..51: note = Synthetic polynucleotide
  source 1..51: mol_type = other DNA
ctttcagctttaacctttgctgggcyttgctatttcaactatcacgatgtg

SEQ ID NO: 1062 - DNA, 51 bp, synthetic construct
  misc_feature 1..51: note = Synthetic polynucleotide
  source 1..51: mol_type = other DNA
taatggcctggcccaggggctgggcyggcccccatgtgggaaggtcctgcg

SEQ ID NO: 1063 - DNA, 51 bp, synthetic construct
  misc_feature 1..51: note = Synthetic polynucleotide
  source 1..51: mol_type = other DNA
ggaagggcgctaccttgagatagagytctgcttgaaacataggagctgccc

SEQ ID NO: 1064 - DNA, 51 bp, synthetic construct
  misc_feature 1..51: note = Synthetic polynucleotide
  source 1..51: mol_type = other DNA
gggcgtgaggatcaatgacagacagbgcaccggcatcgagggggaagattt

SEQ ID NO: 1065 - DNA, 51 bp, synthetic construct
  misc_feature 1..51: note = Synthetic polynucleotide
  source 1..51: mol_type = other DNA
cctgggaccagcttcgagtttgcgcytgcaattgttgaagccctgaatggc

SEQ ID NO: 1066 - DNA, 51 bp, synthetic construct
  misc_feature 1..51: note = Synthetic polynucleotide
  source 1..51: mol_type = other DNA
gctcgcctggaccacaagtttgaccygatgtatgccaaacgtgcctttgtt

SEQ ID NO: 1067 - DNA, 51 bp, synthetic construct
  misc_feature 1..51: note = Synthetic polynucleotide
  source 1..51: mol_type = other DNA
ctcaagatccccggcgtgggctcgcygagccaaagcaccatctgcaggttc

SEQ ID NO: 1068 - DNA, 51 bp, synthetic construct
  misc_feature 1..51: note = Synthetic polynucleotide
  source 1..51: mol_type = other DNA
tggtgaagatgaaaatattctcttcyctccattgagtattgctcttgcaat

SEQ ID NO: 1069 - DNA, 51 bp, synthetic construct
  misc_feature 1..51: note = Synthetic polynucleotide
  source 1..51: mol_type = other DNA
ttcgtgcgcggccgcgagcagctacyggagcgcgtgcggcgcaaggtgggg

SEQ ID NO: 1070 - DNA, 51 bp, synthetic construct
  misc_feature 1..51: note = Synthetic polynucleotide
  source 1..51: mol_type = other DNA
aatagcaacagtggcccaaatgagaytggaaattttggccgtggaggtaag

SEQ ID NO: 1071 - DNA, 51 bp, synthetic construct
  misc_feature 1..51: note = Synthetic polynucleotide
  source 1..51: mol_type = other DNA
actttgcaacagtggaggaaagcctytggagtgataccacaggtgagcaaa

SEQ ID NO: 1072 - DNA, 51 bp, synthetic construct
  misc_feature 1..51: note = Synthetic polynucleotide
  source 1..51: mol_type = other DNA
tggatcagggaagagtactttgttaycagcttttttgagactactgaacac

SEQ ID NO: 1073 - DNA, 51 bp, synthetic construct
  misc_feature 1..51: note = Synthetic polynucleotide
  source 1..51: mol_type = other DNA
acaagcttaaaaggactatggacacbtcgtgccttcggacggcagccttac

SEQ ID NO: 1074 - DNA, 51 bp, synthetic construct
  misc_feature 1..51: note = Synthetic polynucleotide
  source 1..51: mol_type = other DNA
tgtctgccattcttaaaaacaaaaaygttgttatttttatttcagatgcga

SEQ ID NO: 1075 - DNA, 51 bp, synthetic construct
  misc_feature 1..51: note = Synthetic polynucleotide
  source 1..51: mol_type = other DNA
ttttggagaaacacaagttttccttyggatgctgataaaattttgttacgt

SEQ ID NO: 1076 - DNA, 51 bp, synthetic construct
  misc_feature 1..51: note = Synthetic polynucleotide
  source 1..51: mol_type = other DNA
gaggagattgaaaaagacttaattgygagttttagccttaataactttttc

SEQ ID NO: 1077 - DNA, 51 bp, synthetic construct
  misc_feature 1..51: note = Synthetic polynucleotide
  source 1..51: mol_type = other DNA
accctatgcctttgctacaaggaaaytgaagaaaaagaatttacagaatgg

SEQ ID NO: 1078 - DNA, 51 bp, synthetic construct
  misc_feature 1..51: note = Synthetic polynucleotide
  source 1..51: mol_type = other DNA
cgcagcacggagtctcggcgtcccayggcgcaacctacggcctcggcccag

SEQ ID NO: 1079 - DNA, 51 bp, synthetic construct
  misc_feature 1..51: note = Synthetic polynucleotide
  source 1..51: mol_type = other DNA
ggtcacccaggcctcagtcaagaacytccagattgtccacgctgatgaccg

SEQ ID NO: 1080 - DNA, 51 bp, synthetic construct
  misc_feature 1..51: note = Synthetic polynucleotide
  source 1..51: mol_type = other DNA
ctcctggggaaccgcttcacggtctytgacaacgggcagaacccacagcgt

SEQ ID NO: 1081 - DNA, 51 bp, synthetic construct
  misc_feature 1..51: note = Synthetic polynucleotide
  source 1..51: mol_type = other DNA
tcttacggcaaggtgaaggaggtgcyggactcggagacgctgtgcaggagg

SEQ ID NO: 1082 - DNA, 51 bp, synthetic construct
  misc_feature 1..51: note = Synthetic polynucleotide
  source 1..51: mol_type = other DNA
tggcttccgctacatcagtgaggaaygtccactggccattgtgcttcttat

SEQ ID NO: 1083 - DNA, 51 bp, synthetic construct
  misc_feature 1..51: note = Synthetic polynucleotide
  source 1..51: mol_type = other DNA
tctgtaggccgactgctcgagctgcytaccaagctgggccgcgacgacgtg

SEQ ID NO: 1084 - DNA, 51 bp, synthetic construct
  misc_feature 1..51: note = Synthetic polynucleotide
  source 1..51: mol_type = other DNA
ccatctgttgtcctgctggatgaccytgacctcattgctggactgcctgct

SEQ ID NO: 1085 - DNA, 51 bp, synthetic construct
  misc_feature 1..51: note = Synthetic polynucleotide
  source 1..51: mol_type = other DNA
ggagcggccccagactcgtaaattayggccgcatctccgcacactctctcc

SEQ ID NO: 1086 - DNA, 51 bp, synthetic construct
  misc_feature 1..51: note = Synthetic polynucleotide
  source 1..51: mol_type = other DNA
tgtcagcagcgaatcctctgacagcyccgaggaactttctcccacggccaa

SEQ ID NO: 1087 - DNA, 51 bp, synthetic construct
  misc_feature 1..51: note = Synthetic polynucleotide
  source 1..51: mol_type = other DNA
caaatttgacagccaggaagatctgyggaccaaaatcattctggctcggga

SEQ ID NO: 1088 - DNA, 51 bp, synthetic construct
  misc_feature 1..51: note = Synthetic polynucleotide
  source 1..51: mol_type = other DNA
ctgtggggttgcgtgcccggggagcygccctcgccagggaaggtgcgcagc

SEQ ID NO: 1089 - DNA, 51 bp, synthetic construct
  misc_feature 1..51: note = Synthetic polynucleotide
  source 1..51: mol_type = other DNA
cgggtacttcatgcccatctttgtcyatggtgagtctggggtcctgaggtt

SEQ ID NO: 1090 - DNA, 51 bp, synthetic construct
  misc_feature 1..51: note = Synthetic polynucleotide
  source 1..51: mol_type = other DNA
tgtggggcctcgggtcagttcgagtyggagatcctgtccatgcagaacgtg

SEQ ID NO: 1091 - DNA, 51 bp, synthetic construct
  misc_feature 1..51: note = Synthetic polynucleotide
  source 1..51: mol_type = other DNA
acttgctccttttcaattgagagaaycttaggactggaccagaagaaagac

SEQ ID NO: 1092 - DNA, 51 bp, synthetic construct
  misc_feature 1..51: note = Synthetic polynucleotide
  source 1..51: mol_type = other DNA
tcattattgggtgaaaaaacttcccdcctggttttgagtaaaagcagttct

SEQ ID NO: 1093 - DNA, 51 bp, synthetic construct
  misc_feature 1..51: note = Synthetic polynucleotide
  source 1..51: mol_type = other DNA
cttgatggccaaacaacaggacttayacctgcgaattatgtcaaaattctt

SEQ ID NO: 1094 - DNA, 51 bp, synthetic construct
  misc_feature 1..51: note = Synthetic polynucleotide
  source 1..51: mol_type = other DNA
aatgggatgttaaacgtgtcccctaytggaagaagctgcagccaagaagaa

SEQ ID NO: 1095 - DNA, 51 bp, synthetic construct
  misc_feature 1..51: note = Synthetic polynucleotide
  source 1..51: mol_type = other DNA
aggcagaagatcaaaatcggagtggyaggcggatcggactttgagaaagtg

SEQ ID NO: 1096 - DNA, 51 bp, synthetic construct
  misc_feature 1..51: note = Synthetic polynucleotide
  source 1..51: mol_type = other DNA
cgccttctcctctctgtccccagcaygggcaccagcctcagcccgaacgac

SEQ ID NO: 1097 - DNA, 51 bp, synthetic construct
  misc_feature 1..51: note = Synthetic polynucleotide
  source 1..51: mol_type = other DNA
aaagactcgcttcccaaaactgaaayggtgagtgggtcatacagaatgggt

SEQ ID NO: 1098 - DNA, 51 bp, synthetic construct
  misc_feature 1..51: note = Synthetic polynucleotide
  source 1..51: mol_type = other DNA
ggttcagaatgttgcaaatacaaaaytgacaacccggaagaaaaggcattg

SEQ ID NO: 1099 - DNA, 51 bp, synthetic construct
  misc_feature 1..51: note = Synthetic polynucleotide
  source 1..51: mol_type = other DNA
tgacaatcatgttgcagcaattcacbgtaaagctggaaagggacgaactgg

SEQ ID NO: 1100 - DNA, 51 bp, synthetic construct
  misc_feature 1..51: note = Synthetic polynucleotide
  source 1..51: mol_type = other DNA
aaaaaccattacaagatatacaatcygtaagtatgttttcttatttgtatg

SEQ ID NO: 1101 - DNA, 51 bp, synthetic construct
  misc_feature 1..51: note = Synthetic polynucleotide
  source 1..51: mol_type = other DNA
ttttgtgaagatcttgaccaatggcyaagtgaagatgacaatcatgttgca

SEQ ID NO: 1102 - DNA, 51 bp, synthetic construct
  misc_feature 1..51: note = Synthetic polynucleotide
  source 1..51: mol_type = other DNA
cgacgggaagacaagttcatgtactytgagttccctcagccgttacctgtg

SEQ ID NO: 1103 - DNA, 51 bp, synthetic construct
  misc_feature 1..51: note = Synthetic polynucleotide
  source 1..51: mol_type = other DNA
ttggcccacgccgtcctggccaagchgaacgccttcaaggcagacactccc

SEQ ID NO: 1104 - DNA, 51 bp, synthetic construct
  misc_feature 1..51: note = Synthetic polynucleotide
  source 1..51: mol_type = other DNA
aaccgggaaggagtctacacagtctytgctcccacaaatgaagccttccga

SEQ ID NO: 1105 - DNA, 51 bp, synthetic construct
  misc_feature 1..51: note = Synthetic polynucleotide
  source 1..51: mol_type = other DNA
cagctcacccaacgtgccctctctcyactggaggaaaacatgttctgggcc

SEQ ID NO: 1106 - DNA, 51 bp, synthetic construct
  misc_feature 1..51: note = Synthetic polynucleotide
  source 1..51: mol_type = other DNA
ggaaataaaactgacatcttaaggcyacatgaactaaccaaggtaagggaa

SEQ ID NO: 1107 - DNA, 51 bp, synthetic construct
  misc_feature 1..51: note = Synthetic polynucleotide
  source 1..51: mol_type = other DNA
ctttgttaacacagccatccttgaaycaattgaaaaagaagaaaacatggg

SEQ ID NO: 1108 - DNA, 51 bp, synthetic construct
  misc_feature 1..51: note = Synthetic polynucleotide
  source 1..51: mol_type = other DNA
ctttctggatcagaaaaagaaactaygcaaaatcttaatgatagattagct

SEQ ID NO: 1109 - DNA, 51 bp, synthetic construct
  misc_feature 1..51: note = Synthetic polynucleotide
  source 1..51: mol_type = other DNA
gttgacactggccctgaaagcactcycgctcattcactcccggtgaggctc

SEQ ID NO: 1110 - DNA, 51 bp, synthetic construct
  misc_feature 1..51: note = Synthetic polynucleotide
  source 1..51: mol_type = other DNA
tgccttcatcatctgtggcaccttgyacaccgtcagcagctacacctcagc

SEQ ID NO: 1111 - DNA, 51 bp, synthetic construct
  misc_feature 1..51: note = Synthetic polynucleotide
  source 1..51: mol_type = other DNA
gtcagtcgccaatgccttcatcatcygtggcaccttgtacaccgtcagcag

SEQ ID NO: 1112 - DNA, 51 bp, synthetic construct
  misc_feature 1..51: note = Synthetic polynucleotide
  source 1..51: mol_type = other DNA
gattattcccctttaatccgtgttaytggaagagttttttctagtgctgag

SEQ ID NO: 1113 - DNA, 51 bp, synthetic construct
  misc_feature 1..51: note = Synthetic polynucleotide
  source 1..51: mol_type = other DNA
tcgctgaacgaggcgttcgccgcgcygcggaagatcatccccacgctgccc

SEQ ID NO: 1114 - DNA, 51 bp, synthetic construct
  misc_feature 1..51: note = Synthetic polynucleotide
  source 1..51: mol_type = other DNA
tccttcttgcagggcatggagggaaycaaagtgtttctccatgaaagagaa

SEQ ID NO: 1115 - DNA, 51 bp, synthetic construct
  misc_feature 1..51: note = Synthetic polynucleotide
  source 1..51: mol_type = other DNA
gactgctcgacacccccgaacccgcbacagcccaggttgggatgccaagct

SEQ ID NO: 1116 - DNA, 51 bp, synthetic construct
  misc_feature 1..51: note = Synthetic polynucleotide
  source 1..51: mol_type = other DNA
gtcactgagacagtgcgcagggcacytgtgatcaacatgcgaggtgagaca

SEQ ID NO: 1117 - DNA, 51 bp, synthetic construct
  misc_feature 1..51: note = Synthetic polynucleotide
  source 1..51: mol_type = other DNA
atggaccccgtggcccggcgcctgcyttgggacaccgtggcacgagcccga

SEQ ID NO: 1118 - DNA, 51 bp, synthetic construct
  misc_feature 1..51: note = Synthetic polynucleotide
  source 1..51: mol_type = other DNA
atcgccgcctccttcatgaccctgcycttctgtgtcaaggtgagcatggcg

SEQ ID NO: 1119 - DNA, 51 bp, synthetic construct
  misc_feature 1..51: note = Synthetic polynucleotide
  source 1..51: mol_type = other DNA
ctgcctctccccagagtcctgcctcygccccctggagatgaatgtggccca

SEQ ID NO: 1120 - DNA, 51 bp, synthetic construct
  misc_feature 1..51: note = Synthetic polynucleotide
  source 1..51: mol_type = other DNA
accaagcagcagatcgagaaggggcyccagctgtaccagtccaaccagaca

SEQ ID NO: 1121 - DNA, 51 bp, synthetic construct
  misc_feature 1..51: note = Synthetic polynucleotide
  source 1..51: mol_type = other DNA
atcatgaccgagatcggaaaccgccyggggcaggtgcaggcgctgctgggt

SEQ ID NO: 1122 - DNA, 51 bp, synthetic construct
  misc_feature 1..51: note = Synthetic polynucleotide
  source 1..51: mol_type = other DNA
aatgccttcctgggcctcagcgtctyccagaaggccctggagagcttcgag

SEQ ID NO: 1123 - DNA, 51 bp, synthetic construct
  misc_feature 1..51: note = Synthetic polynucleotide
  source 1..51: mol_type = other DNA
ctcctccgcgttccagaatccaagayggcgggatccaggcaaaggggtctc

SEQ ID NO: 1124 - DNA, 51 bp, synthetic construct
  misc_feature 1..51: note = Synthetic polynucleotide
  source 1..51: mol_type = other DNA
cagcggcaagcttctggcttcctgtyctgcagatatgaccattaaactatg

SEQ ID NO: 1125 - DNA, 51 bp, synthetic construct
  misc_feature 1..51: note = Synthetic polynucleotide
  source 1..51: mol_type = other DNA
ggctatgaagaggcatattcagtttytaaaaaggaagctgaattagatgtg

SEQ ID NO: 1126 - DNA, 51 bp, synthetic construct
  misc_feature 1..51: note = Synthetic polynucleotide
  source 1..51: mol_type = other DNA
cagttggaacagctggagtcagcctytgggaggaaccagtaccccgacatc

SEQ ID NO: 1127 - DNA, 51 bp, synthetic construct
  misc_feature 1..51: note = Synthetic polynucleotide
  source 1..51: mol_type = other DNA
gaactttttacccctgaatgcaagtytaaagaatctgtttttgaaaattat

SEQ ID NO: 1128 - DNA, 51 bp, synthetic construct
  misc_feature 1..51: note = Synthetic polynucleotide
  source 1..51: mol_type = other DNA
gtggctggagggtaacccctgggacygtggctgccctctcaaggcgctgcg

SEQ ID NO: 1129 - DNA, 51 bp, synthetic construct
  misc_feature 1..51: note = Synthetic polynucleotide
  source 1..51: mol_type = other DNA
cccttgcctgttccgtccctagactycttctcggattctcctcctgaccaa

SEQ ID NO: 1130 - DNA, 51 bp, synthetic construct
  misc_feature 1..51: note = Synthetic polynucleotide
  source 1..51: mol_type = other DNA
gcactgggccccagagctaggagtcyttgcagactttgggaaccacacaaa

SEQ ID NO: 1131 - DNA, 51 bp, synthetic construct
  misc_feature 1..51: note = Synthetic polynucleotide
  source 1..51: mol_type = other DNA
tacgtgcccaccaacggctcagcctyggtgctccaggtggactctggtgcc

SEQ ID NO: 1132 - DNA, 51 bp, synthetic construct
  misc_feature 1..51: note = Synthetic polynucleotide
  source 1..51: mol_type = other DNA
agcccagctacgccggacaatagaaygttgtcggaccaatttatgtaacca

SEQ ID NO: 1133 - DNA, 51 bp, synthetic construct
  misc_feature 1..51: note = Synthetic polynucleotide
  source 1..51: mol_type = other DNA
ccgagtgatccgtcatacgaagataygcgtgaggttgtgtgtgtcaaacgt

SEQ ID NO: 1134 - DNA, 51 bp, synthetic construct
  misc_feature 1..51: note = Synthetic polynucleotide
  source 1..51: mol_type = other DNA
gtggcgggttactccctggggtttcytctggctagaattgctggtctaccc

SEQ ID NO: 1135 - DNA, 51 bp, synthetic construct
  misc_feature 1..51: note = Synthetic polynucleotide
  source 1..51: mol_type = other DNA
caactcgccgtacatcgtgggcttcyacggggccttctacagtgacgggga

SEQ ID NO: 1136 - DNA, 51 bp, synthetic construct
  misc_feature 1..51: note = Synthetic polynucleotide
  source 1..51: mol_type = other DNA
ctgctgggcgtcccactggccctgchctggggcttcctgttcgcctgcatc

SEQ ID NO: 1137 - DNA, 51 bp, synthetic construct
  misc_feature 1..51: note = Synthetic polynucleotide
  source 1..51: mol_type = other DNA
ccggagaacttcaatgaagccaagthcatcaccttcagcatgctcatcttc

SEQ ID NO: 1138 - DNA, 51 bp, synthetic construct
  misc_feature 1..51: note = Synthetic polynucleotide
  source 1..51: mol_type = other DNA
aattgattctttgaaccttgatgagytctgcaactgctcagagcacattcc

SEQ ID NO: 1139 - DNA, 51 bp, synthetic construct
  misc_feature 1..51: note = Synthetic polynucleotide
  source 1..51: mol_type = other DNA
gagtttctgtcgtggacggagccctytgggatcgcactcaccctctttgcc

SEQ ID NO: 1140 - DNA, 51 bp, synthetic construct
  misc_feature 1..51: note = Synthetic polynucleotide
  source 1..51: mol_type = other DNA
gcgttgcagcaccgcagctcacgctytcaaggtggctgcccgggccacgct

SEQ ID NO: 1141 - DNA, 51 bp, synthetic construct
  misc_feature 1..51: note = Synthetic polynucleotide
  source 1..51: mol_type = other DNA
caaaacaaaattgattctttgaaccytgatgagttctgcaactgctcagag

SEQ ID NO: 1142 - DNA, 51 bp, synthetic construct
  misc_feature 1..51: note = Synthetic polynucleotide
  source 1..51: mol_type = other DNA
cacctgcctgctggctgccatctgcytcttctttgccttcaagtcccggaa

SEQ ID NO: 1143 - DNA, 51 bp, synthetic construct
  misc_feature 1..51: note = Synthetic polynucleotide
  source 1..51: mol_type = other DNA
agctgctgctgggtcctcttggcacycacctggcacacctctgcctacggg

SEQ ID NO: 1144 - DNA, 51 bp, synthetic construct
  misc_feature 1..51: note = Synthetic polynucleotide
  source 1..51: mol_type = other DNA
ctggcatattccaggtgcatccaggygcgggcgtcatgctgggcttgggtc

SEQ ID NO: 1145 - DNA, 51 bp, synthetic construct
  misc_feature 1..51: note = Synthetic polynucleotide
  source 1..51: mol_type = other DNA
ttcaccagatcccagcgcaagaaccygttcgcagagatgcgcgagcagctg

SEQ ID NO: 1146 - DNA, 51 bp, synthetic construct
  misc_feature 1..51: note = Synthetic polynucleotide
  source 1..51: mol_type = other DNA
tgcgagttcccattgcgctcccaccyggagcccacgaatcatgcagtcatc

SEQ ID NO: 1147 - DNA, 51 bp, synthetic construct
  misc_feature 1..51: note = Synthetic polynucleotide
  source 1..51: mol_type = other DNA
tgattcggaagccacagtccgagagygagttgccttctttccatcctaatg

SEQ ID NO: 1148 - DNA, 51 bp, synthetic construct
  misc_feature 1..51: note = Synthetic polynucleotide
  source 1..51: mol_type = other DNA
aactggggaaacaaaggatatatccycatggctcgaaataagaacaacgcc

SEQ ID NO: 1149 - DNA, 51 bp, synthetic construct
  misc_feature 1..51: note = Synthetic polynucleotide
  source 1..51: mol_type = other DNA
atcatcgtcctccacgtcgcggtgcyggtgctgctgttcgtctccacgatc

SEQ ID NO: 1150 - DNA, 51 bp, synthetic construct
  misc_feature 1..51: note = Synthetic polynucleotide
  source 1..51: mol_type = other DNA
atatctatctgattctctctagcaayggatcgtgggcaatggacacgcaac

SEQ ID NO: 1151 - DNA, 51 bp, synthetic construct
  misc_feature 1..51: note = Synthetic polynucleotide
  source 1..51: mol_type = other DNA
atctaccagttcatcatggaccgcthccccttctaccgggacaacaagcag

SEQ ID NO: 1152 - DNA, 51 bp, synthetic construct
  misc_feature 1..51: note = Synthetic polynucleotide
  source 1..51: mol_type = other DNA
ccaagacatcaagccttgcgtgatgygaggctgccgccgcaggccctcctg

SEQ ID NO: 1153 - DNA, 51 bp, synthetic construct
  misc_feature 1..51: note = Synthetic polynucleotide
  source 1..51: mol_type = other DNA
ctctttttttctcttagatattcagyctaaaagcagcaaggccgtggtgca

SEQ ID NO: 1154 - DNA, 51 bp, synthetic construct
  misc_feature 1..51: note = Synthetic polynucleotide
  source 1..51: mol_type = other DNA
ctgaatgtgttcttggccatcgctgyggacaatctggccaacgcccaggag

SEQ ID NO: 1155 - DNA, 51 bp, synthetic construct
  misc_feature 1..51: note = Synthetic polynucleotide
  source 1..51: mol_type = other DNA
gggtaccgcatggagatgtccatttyctacgtcgtctactttgtggtgttc

SEQ ID NO: 1156 - DNA, 51 bp, synthetic construct
  misc_feature 1..51: note = Synthetic polynucleotide
  source 1..51: mol_type = other DNA
atgctcttcttcatctatgccatcaytgggatgcaggtgagtgtcgtgtcc

SEQ ID NO: 1157 - DNA, 51 bp, synthetic construct
  misc_feature 1..51: note = Synthetic polynucleotide
  source 1..51: mol_type = other DNA
cagagctggcagaggttctaccaacygaccaagctgctggactccatgcat

SEQ ID NO: 1158 - DNA, 51 bp, synthetic construct
  misc_feature 1..51: note = Synthetic polynucleotide
  source 1..51: mol_type = other DNA
gtggagtcggggaacgccaagccgcyctacttccaccggaagtgactgccc

SEQ ID NO: 1159 - DNA, 51 bp, synthetic construct
  misc_feature 1..51: note = Synthetic polynucleotide
  source 1..51: mol_type = other DNA
ctcaccctcctcattccctatctccytggccgcaagaggaggtggagcaaa

SEQ ID NO: 1160 - DNA, 51 bp, synthetic construct
  misc_feature 1..51: note = Synthetic polynucleotide
  source 1..51: mol_type = other DNA
ctggggtgcctgcgaggggctggccygcagctatggctggaacttcaccga

SEQ ID NO: 1161 - DNA, 51 bp, synthetic construct
  misc_feature 1..51: note = Synthetic polynucleotide
  source 1..51: mol_type = other DNA
tcggtacaggctggctcctacaaccyggccctcagctactcggtgggcctc

SEQ ID NO: 1162 - DNA, 51 bp, synthetic construct
  misc_feature 1..51: note = Synthetic polynucleotide
  source 1..51: mol_type = other DNA
tctgctggggaaaacagctgttactytaattcatcgtttacctccatctgg

SEQ ID NO: 1163 - DNA, 51 bp, synthetic construct
  misc_feature 1..51: note = Synthetic polynucleotide
  source 1..51: mol_type = other DNA
agtttaactgggattcatgcagatayccaagtgagatgggaagcaccacgc

SEQ ID NO: 1164 - DNA, 51 bp, synthetic construct
  misc_feature 1..51: note = Synthetic polynucleotide
  source 1..51: mol_type = other DNA
actgaggagtgcccactggccatccygatcctcatcgtgcagaacatcgtg

SEQ ID NO: 1165 - DNA, 51 bp, synthetic construct
  misc_feature 1..51: note = Synthetic polynucleotide
  source 1..51: mol_type = other DNA
ccgctttgtgtccaagaaaggcaacygcaacgtggcccacaagaacatccg

SEQ ID NO: 1166 - DNA, 51 bp, synthetic construct
  misc_feature 1..51: note = Synthetic polynucleotide
  source 1..51: mol_type = other DNA
accgtggtcgtgctgggcggaggcaycagcggcttggccgccagttaccac

SEQ ID NO: 1167 - DNA, 51 bp, synthetic construct
  misc_feature 1..51: note = Synthetic polynucleotide
  source 1..51: mol_type = other DNA
aaagaatcaaaggccttgatgggacyctaccatggtcaggtcctgtgcaag

SEQ ID NO: 1168 - DNA, 51 bp, synthetic construct
  misc_feature 1..51: note = Synthetic polynucleotide
  source 1..51: mol_type = other DNA
ctggcagtggcctgcaggaaggctcytgacagcacgacagtcgcggctcat

SEQ ID NO: 1169 - DNA, 51 bp, synthetic construct
  misc_feature 1..51: note = Synthetic polynucleotide
  source 1..51: mol_type = other DNA
tttctgctgttgtagcacagatttahgtaatgtcaactttactgagaattt

SEQ ID NO: 1170 - DNA, 51 bp, synthetic construct
  misc_feature 1..51: note = Synthetic polynucleotide
  source 1..51: mol_type = other DNA
catcccaggcaccccgccccccaacyatgactccctgcgtctgcagccgct

SEQ ID NO: 1171 - DNA, 51 bp, synthetic construct
  misc_feature 1..51: note = Synthetic polynucleotide
  source 1..51: mol_type = other DNA
tcaaaggcccacgtgcattgctccgycaagtccggtgagccgccgccgggg

SEQ ID NO: 1172 - DNA, 51 bp, synthetic construct
  misc_feature 1..51: note = Synthetic polynucleotide
  source 1..51: mol_type = other DNA
tttggccatctcggtgatgaaccagbggccaggagtgaaactgcgggtgac

SEQ ID NO: 1173 - DNA, 51 bp, synthetic construct
  misc_feature 1..51: note = Synthetic polynucleotide
  source 1..51: mol_type = other DNA
gaccgccggctcctgcccgccgctgygcacagcgtgaccctaagcgaggag

SEQ ID NO: 1174 - DNA, 51 bp, synthetic construct
  misc_feature 1..51: note = Synthetic polynucleotide
  source 1..51: mol_type = other DNA
aaaattatagggatcatggaagaagbtgctgatggttttaagtctaaaatc

SEQ ID NO: 1175 - DNA, 51 bp, synthetic construct
  misc_feature 1..51: note = Synthetic polynucleotide
  source 1..51: mol_type = other DNA
aaccctcactattgactgcgtccagyttcagagaggaggcaaagaattcct

SEQ ID NO: 1176 - DNA, 51 bp, synthetic construct
  misc_feature 1..51: note = Synthetic polynucleotide
  source 1..51: mol_type = other DNA
ggaactggatatatcaagactgagtygatttctgtgtctgaagtgtaagtg

SEQ ID NO: 1177 - DNA, 51 bp, synthetic construct
  misc_feature 1..51: note = Synthetic polynucleotide
  source 1..51: mol_type = other DNA
aaggaccagcagccggggaccttccygctgcggttcagtgagagctcccgg

SEQ ID NO: 1178 - DNA, 51 bp, synthetic construct
  misc_feature 1..51: note = Synthetic polynucleotide
  source 1..51: mol_type = other DNA
agggacagcaacatttactgtatctyctatgaaggtgggagaaaagaaaga

SEQ ID NO: 1179 - DNA, 51 bp, synthetic construct
  misc_feature 1..51: note = Synthetic polynucleotide
  source 1..51: mol_type = other DNA
ctatcacaacatcgagacttccaacbtccccaagctgctaattggtaggtg

SEQ ID NO: 1180 - DNA, 51 bp, synthetic construct
  misc_feature 1..51: note = Synthetic polynucleotide
  source 1..51: mol_type = other DNA
gctgggcagggagctcgcttccctgytccgggctggccgggagccccaggg

SEQ ID NO: 1181 - DNA, 51 bp, synthetic construct
  misc_feature 1..51: note = Synthetic polynucleotide
  source 1..51: mol_type = other DNA
aacatctttctcattataaaggcacrtggcacagtgaggggtctccacttc

SEQ ID NO: 1182 - DNA, 51 bp, synthetic construct
  misc_feature 1..51: note = Synthetic polynucleotide
  source 1..51: mol_type = other DNA
aacccaccctgtcatccaggacaacygcccgctggtgcggaacccagacca

SEQ ID NO: 1183 - DNA, 51 bp, synthetic construct
  misc_feature 1..51: note = Synthetic polynucleotide
  source 1..51: mol_type = other DNA
ggacgaggacaagtggggcgatgcgygcgacaactgccggtcccagaagaa

SEQ ID NO: 1184 - DNA, 51 bp, synthetic construct
  misc_feature 1..51: note = Synthetic polynucleotide
  source 1..51: mol_type = other DNA
atcctggagatcgattgcaccatgcycacccctgagccagttttaaagtga

SEQ ID NO: 1185 - DNA, 51 bp, synthetic construct
  misc_feature 1..51: note = Synthetic polynucleotide
  source 1..51: mol_type = other DNA
cctcgaccgcataggccagttcaccygtatctgtatggcaggtgggtggtg

SEQ ID NO: 1186 - DNA, 51 bp, synthetic construct
  misc_feature 1..51: note = Synthetic polynucleotide
  source 1..51: mol_type = other DNA
ctgctacggtggtactgcctccctcytcaatgctgccaactggatggagtc

SEQ ID NO: 1187 - DNA, 51 bp, synthetic construct
  misc_feature 1..51: note = Synthetic polynucleotide
  source 1..51: mol_type = other DNA
ccagctctctgctggttactcacgayggccctcggtgacatcccaggtaga

SEQ ID NO: 1188 - DNA, 51 bp, synthetic construct
  misc_feature 1..51: note = Synthetic polynucleotide
  source 1..51: mol_type = other DNA
atggtaatgcgaggtgtacagaaaaygaacagcaaaactgtgaccagcaca

SEQ ID NO: 1189 - DNA, 51 bp, synthetic construct
  misc_feature 1..51: note = Synthetic polynucleotide
  source 1..51: mol_type = other DNA
cgcgtctttccacagccaggcagtcygtatcttgcaaaaacatccactctg

SEQ ID NO: 1190 - DNA, 51 bp, synthetic construct
  misc_feature 1..51: note = Synthetic polynucleotide
  source 1..51: mol_type = other DNA
ggagacagggtttggctgaagaaatycccaggggatcagcacatagctatc

SEQ ID NO: 1191 - DNA, 51 bp, synthetic construct
  misc_feature 1..51: note = Synthetic polynucleotide
  source 1..51: mol_type = other DNA
aatgggcagcgacacgcggcagagaycgccaacatgtcactggacatcctc

SEQ ID NO: 1192 - DNA, 51 bp, synthetic construct
  misc_feature 1..51: note = Synthetic polynucleotide
  source 1..51: mol_type = other DNA
ctgtcacgatttgagggcatgagggyaagagaggtggctgccttcccacca

SEQ ID NO: 1193 - DNA, 51 bp, synthetic construct
  misc_feature 1..51: note = Synthetic polynucleotide
  source 1..51: mol_type = other DNA
gagtgaggacgacttcgatatgttcyatgagatctgggagaaatttgaccc

SEQ ID NO: 1194 - DNA, 51 bp, synthetic construct
  misc_feature 1..51: note = Synthetic polynucleotide
  source 1..51: mol_type = other DNA
cccggagagcttcagctgctcaacgycacctctgccttggaccgtgggggc

SEQ ID NO: 1195 - DNA, 51 bp, synthetic construct
  misc_feature 1..51: note = Synthetic polynucleotide
  source 1..51: mol_type = other DNA
aggctccgagaaatgcagtctttctycggcttagaggtgactggcaaactt

SEQ ID NO: 1196 - DNA, 51 bp, synthetic construct
  misc_feature 1..51: note = Synthetic polynucleotide
  source 1..51: mol_type = other DNA
gagaggctccgagaaatgcagtcttycttcggcttagaggtgactggcaaa

SEQ ID NO: 1197 - DNA, 51 bp, synthetic construct
  misc_feature 1..51: note = Synthetic polynucleotide
  source 1..51: mol_type = other DNA
cttgacgataacaccttagatgtcaygaaaaagccaagatgcggggttcct

SEQ ID NO: 1198 - DNA, 51 bp, synthetic construct
  misc_feature 1..51: note = Synthetic polynucleotide
  source 1..51: mol_type = other DNA
ctccttttgtatgactaggtacctgyactgggctgactgggatacacatgc

SEQ ID NO: 1199 - DNA, 51 bp, synthetic construct
  misc_feature 1..51: note = Synthetic polynucleotide
  source 1..51: mol_type = other DNA
gatgacctcaggaatgtcaagaagcyaggtggcgacctgctccgggccctc

SEQ ID NO: 1200 - DNA, 51 bp, synthetic construct
  misc_feature 1..51: note = Synthetic polynucleotide
  source 1..51: mol_type = other DNA
gtactatctgatggacctctcctacyccatgcttgatgacctcaggaatgt

SEQ ID NO: 1201 - DNA, 51 bp, synthetic construct
  misc_feature 1..51: note = Synthetic polynucleotide
  source 1..51: mol_type = other DNA
caaaatcaagaagatgctgcctgtgygtcccccaggggcaggggggctgcc

SEQ ID NO: 1202 - DNA, 51 bp, synthetic construct
  misc_feature 1..51: note = Synthetic polynucleotide
  source 1..51: mol_type = other DNA
ttgactgggagagaacacgtggagtyctttgcccttttgagaggagtccca

SEQ ID NO: 1203 - DNA, 51 bp, synthetic construct
  misc_feature 1..51: note = Synthetic polynucleotide
  source 1..51: mol_type = other DNA
aacaaagccaaagcacacatcaaggygagaatttttactttcagatttgca

SEQ ID NO: 1204 - DNA, 51 bp, synthetic construct
  misc_feature 1..51: note = Synthetic polynucleotide
  source 1..51: mol_type = other DNA
gtctttagatttacagtccaatgctycactcagccattttacctcaccccc

SEQ ID NO: 1205 - DNA, 51 bp, synthetic construct
  misc_feature 1..51: note = Synthetic polynucleotide
  source 1..51: mol_type = other DNA
ccaaccccatggcctccatgactttytcaaaaaggtattagaaaaaccatt

SEQ ID NO: 1206 - DNA, 51 bp, synthetic construct
  misc_feature 1..51: note = Synthetic polynucleotide
  source 1..51: mol_type = other DNA
agccaaccccatggcctccatgactytttcaaaaaggtattagaaaaacca

SEQ ID NO: 1207 - DNA, 51 bp, synthetic construct
  misc_feature 1..51: note = Synthetic polynucleotide
  source 1..51: mol_type = other DNA
gccaaccccatggcctccatgacttyttcaaaaaggtattagaaaaaccat

SEQ ID NO: 1208 - DNA, 51 bp, synthetic construct
  misc_feature 1..51: note = Synthetic polynucleotide
  source 1..51: mol_type = other DNA
cctcctcaaagcaatacactgaaaabgtttagacgggctcacatcacccca

SEQ ID NO: 1209 - DNA, 51 bp, synthetic construct
  misc_feature 1..51: note = Synthetic polynucleotide
  source 1..51: mol_type = other DNA
tatcacaccccatcctaaagtaaggycagctaaataagctatcgggcccat

SEQ ID NO: 1210 - DNA, 51 bp, synthetic construct
  misc_feature 1..51: note = Synthetic polynucleotide
  source 1..51: mol_type = other DNA
aaagattaagagaaccaacacctctytacagtgaaatgccccaactaaata

SEQ ID NO: 1211 - DNA, 51 bp, synthetic construct
  misc_feature 1..51: note = Synthetic polynucleotide
  source 1..51: mol_type = other DNA
aaaggataacagctatccattggtcytaggccccaaaaattttggtgcaac

SEQ ID NO: 1212 - DNA, 51 bp, synthetic construct
  misc_feature 1..51: note = Synthetic polynucleotide
  source 1..51: mol_type = other DNA
ccggtaatcgcataaaacttaaaacyttacagtcagaggttcaattcctct

SEQ ID NO: 1213 - DNA, 51 bp, synthetic construct
  misc_feature 1..51: note = Synthetic polynucleotide
  source 1..51: mol_type = other DNA
ggtttgttaagatggcagagcccggyaatcgcataaaacttaaaactttac

SEQ ID NO: 1214 - DNA, 51 bp, synthetic construct
  misc_feature 1..51: note = Synthetic polynucleotide
  source 1..51: mol_type = other DNA
taaaactttacagtcagaggttcaaytcctcttcttaacaacatacccatg

SEQ ID NO: 1215 - DNA, 51 bp, synthetic construct
  misc_feature 1..51: note = Synthetic polynucleotide
  source 1..51: mol_type = other DNA
aaatatgtctgataaaagagttactytgatagagtaaataataggagctta

SEQ ID NO: 1216 - DNA, 51 bp, synthetic construct
  misc_feature 1..51: note = Synthetic polynucleotide
  source 1..51: mol_type = other DNA
aatatgtctgataaaagagttacttygatagagtaaataataggagcttaa

SEQ ID NO: 1217 - DNA, 51 bp, synthetic construct
  misc_feature 1..51: note = Synthetic polynucleotide
  source 1..51: mol_type = other DNA
atctattgatgagggtcttactcttytagtataaatagtaccgttaacttc

SEQ ID NO: 1218 - DNA, 51 bp, synthetic construct
  misc_feature 1..51: note = Synthetic polynucleotide
  source 1..51: mol_type = other DNA
ggtcttactcttttagtataaatagyaccgttaacttccaattaactagtt

SEQ ID NO: 1219 - DNA, 51 bp, synthetic construct
  misc_feature 1..51: note = Synthetic polynucleotide
  source 1..51: mol_type = other DNA
gcttaaacccccttatttctaggacyatgagaatcgaacccatccctgaga

SEQ ID NO: 1220 - DNA, 51 bp, synthetic construct
  misc_feature 1..51: note = Synthetic polynucleotide
  source 1..51: mol_type = other DNA
cggactacaaccacgaccaatgataygaaaaaccatcgttgtatttcaact

SEQ ID NO: 1221 - DNA, 51 bp, synthetic construct
  misc_feature 1..51: note = Synthetic polynucleotide
  source 1..51: mol_type = other DNA
tcaacagaaacaaagcatacatcatbattctcgcacggactacaaccacga

SEQ ID NO: 1222 - DNA, 51 bp, synthetic construct
  misc_feature 1..51: note = Synthetic polynucleotide
  source 1..51: mol_type = other DNA
gggacttaaacccacaaacacttagytaacagctaagcaccctaatcaact

SEQ ID NO: 1223 - DNA, 51 bp, synthetic construct
  misc_feature 1..51: note = Synthetic polynucleotide
  source 1..51: mol_type = other DNA
gcaccctaatcaactggcttcaatcyacttctcccgccgccgggaaaaaag

SEQ ID NO: 1224 - DNA, 51 bp, synthetic construct
  misc_feature 1..51: note = Synthetic polynucleotide
  source 1..51: mol_type = other DNA
tcaacaatagggtttacgacctcgaygttggatcaggacatcccgatggtg

SEQ ID NO: 1225 - DNA, 51 bp, synthetic construct
  misc_feature 1..51: note = Synthetic polynucleotide
  source 1..51: mol_type = other DNA
atcttcagcaaaccctgatgaaggcyacaaagtaagcgcaagtacccacgt

SEQ ID NO: 1226 - DNA, 51 bp, synthetic construct
  misc_feature 1..51: note = Synthetic polynucleotide
  source 1..51: mol_type = other DNA
ctgggattagataccccactatgctyagccctaaacctcaacagttaaatc

SEQ ID NO: 1227 - DNA, 51 bp, synthetic construct
  misc_feature 1..51: note = Synthetic polynucleotide
  source 1..51: mol_type = other DNA
ttataacaaaccctgagaaccaaaaygaacgaaaatctgttcgcttcattc

SEQ ID NO: 1228 - DNA, 51 bp, synthetic construct
  misc_feature 1..51: note = Synthetic polynucleotide
  source 1..51: mol_type = other DNA
agcctactcattcaaccaatagcccbggccgtacgcctaaccgctaacatt

SEQ ID NO: 1229 - DNA, 51 bp, synthetic construct
  misc_feature 1..51: note = Synthetic polynucleotide
  source 1..51: mol_type = other DNA
attaaccttccctctacacttatcaycttcacaattctaattctactgact

SEQ ID NO: 1230 - DNA, 51 bp, synthetic construct
  misc_feature 1..51: note = Synthetic polynucleotide
  source 1..51: mol_type = other DNA
atccaagcctacgttttcacacttcbagtaagcctctacctgcacgacaac

SEQ ID NO: 1231 - DNA, 51 bp, synthetic construct
  misc_feature 1..51: note = Synthetic polynucleotide
  source 1..51: mol_type = other DNA
aaacctagccatggccatccccttaygagcgggcacagtgattataggctt

SEQ ID NO: 1232 - DNA, 51 bp, synthetic construct
  misc_feature 1..51: note = Synthetic polynucleotide
  source 1..51: mol_type = other DNA
tacgttttcacacttctagtaagccyctacctgcacgacaacacataatga

SEQ ID NO: 1233 - DNA, 51 bp, synthetic construct
  misc_feature 1..51: note = Synthetic polynucleotide
  source 1..51: mol_type = other DNA
ataggctaaatcctatatatcttaayggcacatgcagcgcaagtaggtcta

SEQ ID NO: 1234 - DNA, 51 bp, synthetic construct
  misc_feature 1..51: note = Synthetic polynucleotide
  source 1..51: mol_type = other DNA
ggtatggtctgagctatgatatcaaytggcttcctagggtttatcgtgtga

SEQ ID NO: 1235 - DNA, 51 bp, synthetic construct
  misc_feature 1..51: note = Synthetic polynucleotide
  source 1..51: mol_type = other DNA
aaagaaccatttggatacataggtayggtctgagctatgatatcaattggc

SEQ ID NO: 1236 - DNA, 51 bp, synthetic construct
  misc_feature 1..51: note = Synthetic polynucleotide
  source 1..51: mol_type = other DNA
catgaaacatcctatcatctgtaggytcattcatttctctaacagcagtaa

SEQ ID NO: 1237 - DNA, 51 bp, synthetic construct
  misc_feature 1..51: note = Synthetic polynucleotide
  source 1..51: mol_type = other DNA
catcaagcccgaatgatatttcctaytcgcctacacaattctccgatccgt

SEQ ID NO: 1238 - DNA, 51 bp, synthetic construct
  misc_feature 1..51: note = Synthetic polynucleotide
  source 1..51: mol_type = other DNA
ggccacagtaattacaaacttactayccgccatcccatacattgggacaga

SEQ ID NO: 1239 - DNA, 51 bp, synthetic construct
  misc_feature 1..51: note = Synthetic polynucleotide
  source 1..51: mol_type = other DNA
catctccgcatgatgaaacttcggcycactccttggcgcctgcctgatcct

SEQ ID NO: 1240 - DNA, 51 bp, synthetic construct
  misc_feature 1..51: note = Synthetic polynucleotide
  source 1..51: mol_type = other DNA
gctgtagtatatccaaagacaaccaycattccccctaaataaattaaaaaa

SEQ ID NO: 1241 - DNA, 51 bp, synthetic construct
  misc_feature 1..51: note = Synthetic polynucleotide
  source 1..51: mol_type = other DNA
gtagtatatccaaagacaaccatcaytccccctaaataaattaaaaaaact

SEQ ID NO: 1242 - DNA, 51 bp, synthetic construct
  misc_feature 1..51: note = Synthetic polynucleotide
  source 1..51: mol_type = other DNA
atcagttcttcaaatatctactcatyttcctaattaccatactaatcttag

SEQ ID NO: 1243 - DNA, 51 bp, synthetic construct
  misc_feature 1..51: note = Synthetic polynucleotide
  source 1..51: mol_type = other DNA
ctcacacctcatatcctccctactaygcctagaaggaataatactatcgct

SEQ ID NO: 1244 - DNA, 51 bp, synthetic construct
  misc_feature 1..51: note = Synthetic polynucleotide
  misc_difference 50: note = n is a, c, g, t or u
  source 1..51: mol_type = other DNA
atattgtgcctattgccatactagtytttgccgcctgcgaagcagcggtng

SEQ ID NO: 1245 - DNA, 51 bp, synthetic construct
  misc_feature 1..51: note = Synthetic polynucleotide
  source 1..51: mol_type = other DNA
ttacgagtgcggcttcgaccctataycccccgcccgcgtccctttctccat

SEQ ID NO: 1246 - DNA, 51 bp, synthetic construct
  misc_feature 1..51: note = Synthetic polynucleotide
  source 1..51: mol_type = other DNA
acaactcaacggctacatagaaaaayccaccccttacgagtgcggcttcga

SEQ ID NO: 1247 - DNA, 51 bp, synthetic construct
  misc_feature 1..51: note = Synthetic polynucleotide
  source 1..51: mol_type = other DNA
caagcaaccgcatccataatccttcyaatagctatcctcttcaacaatata

SEQ ID NO: 1248 - DNA, 51 bp, synthetic construct
  misc_feature 1..51: note = Synthetic polynucleotide
  source 1..51: mol_type = other DNA
tacccccgattccgctacgaccaacycatacacctcctatgaaaaaacttc

SEQ ID NO: 1249 - DNA, 51 bp, synthetic construct
  misc_feature 1..51: note = Synthetic polynucleotide
  source 1..51: mol_type = other DNA
gcttaccgaacgaaaaattctaggcyatatacaactacgcaaaggccccaa

SEQ ID NO: 1250 - DNA, 51 bp, synthetic construct
  misc_feature 1..51: note = Synthetic polynucleotide
  source 1..51: mol_type = other DNA
ggttcaattcctcttcttaacaacabacccatggccaacctcctactcctc

SEQ ID NO: 1251 - DNA, 51 bp, synthetic construct
  misc_feature 1..51: note = Synthetic polynucleotide
  source 1..51: mol_type = other DNA
actagtctcaggcttcaacatcgaayacgccgcaggccccttcgccctatt

SEQ ID NO: 1252 - DNA, 51 bp, synthetic construct
  misc_feature 1..51: note = Synthetic polynucleotide
  source 1..51: mol_type = other DNA
cttactgaagccgaaaaatggccatycttccaggaggcacagaaattacag

SEQ ID NO: 1253 - DNA, 51 bp, synthetic construct
  misc_feature 1..51: note = Synthetic polynucleotide
  source 1..51: mol_type = other DNA
gtgaagcgacccatgaacgcattcaycgtgtggtctcgcgatcagaggcgc

SEQ ID NO: 1254 - DNA, 51 bp, synthetic construct
  misc_feature 1..51: note = Synthetic polynucleotide
  misc_difference 26: note = n is a, c, g, t or u
  source 1..51: mol_type = other DNA
actctatactggtatcaacatgttcngctggtctgctgtacagctgaaaat

SEQ ID NO: 1255 - DNA, 51 bp, synthetic construct
  misc_feature 1..51: note = Synthetic polynucleotide
  source 1..51: mol_type = other DNA
caccagatggaacaatactatcaccyagtggatatggaattgaactgcaca

SEQ ID NO: 1256 - DNA, 51 bp, synthetic construct
  misc_feature 1..51: note = Synthetic polynucleotide
  source 1..51: mol_type = other DNA
tgtcagcccatctttctgaatgtccyggaagccattgagccaggtgtagtg

SEQ ID NO: 1257 - DNA, 51 bp, synthetic construct
  misc_feature 1..51: note = Synthetic polynucleotide
  source 1..51: mol_type = other DNA
atcaccccccaggaattcctgtgcaygaaagcactgctactcttcagcatt

SEQ ID NO: 1258 - DNA, 51 bp, synthetic construct
  misc_feature 1..51: note = Synthetic polynucleotide
  source 1..51: mol_type = other DNA
ctaccagctcaccaagctcctggacyccgtgcagcctgtaagcaaacgatg

SEQ ID NO: 1259 - DNA, 51 bp, synthetic construct
  misc_feature 1..51: note = Synthetic polynucleotide
  source 1..51: mol_type = other DNA
gaagcacgcggaggccctggggctcygacccgccgcgcagccccccgcgcg

SEQ ID NO: 1260 - DNA, 51 bp, synthetic construct
  misc_feature 1..51: note = Synthetic polynucleotide
  source 1..51: mol_type = other DNA
ttgagccgggccttgtttgcagtccrcgaagaataccagcccacatactgc

SEQ ID NO: 1261 - DNA, 51 bp, synthetic construct
  misc_feature 1..51: note = Synthetic polynucleotide
  source 1..51: mol_type = other DNA
atagaaggctttttgttattacttcyctttggctatgaaggtatgtgctat

SEQ ID NO: 1262 - DNA, 51 bp, synthetic construct
  misc_feature 1..51: note = Synthetic polynucleotide
  source 1..51: mol_type = other DNA
ccgagctgaggcaggcatcaggcacrcttgctgacgcactccagcagctcc

SEQ ID NO: 1263 - DNA, 51 bp, synthetic construct
  misc_feature 1..51: note = Synthetic polynucleotide
  source 1..51: mol_type = other DNA
atctcagccaagcttgttgcaaataygctatctgtagcaggtgcagatcat

SEQ ID NO: 1264 - DNA, 51 bp, synthetic construct
  misc_feature 1..51: note = Synthetic polynucleotide
  source 1..51: mol_type = other DNA
aatttgtatgcagagccggctgtccyaaagtggataagggagaatatctct

SEQ ID NO: 1265 - DNA, 51 bp, synthetic construct
  misc_feature 1..51: note = Synthetic polynucleotide
  source 1..51: mol_type = other DNA
tttcctttcttgcctttctaggtgaytgacatctctatgatccttgcagaa

SEQ ID NO: 1266 - DNA, 51 bp, synthetic construct
  misc_feature 1..51: note = Synthetic polynucleotide
  source 1..51: mol_type = other DNA
ccagttgctgtagaactcaaatctcygctgggcaagtaagtgccaggctct

SEQ ID NO: 1267 - DNA, 51 bp, synthetic construct
  misc_feature 1..51: note = Synthetic polynucleotide
  source 1..51: mol_type = other DNA
cacctctacccctcagggcttggacygtggtcctgaaagcagcaagaagta

SEQ ID NO: 1268 - DNA, 51 bp, synthetic construct
  misc_feature 1..51: note = Synthetic polynucleotide
  source 1..51: mol_type = other DNA
catcattttggctcccctgtgtagaytggcacttctctgtttgatgaagag

SEQ ID NO: 1269 - DNA, 51 bp, synthetic construct
  misc_feature 1..51: note = Synthetic polynucleotide
  source 1..51: mol_type = other DNA
cattgcaaataacaatctcagctacygggatgcccccctgggaagttctta

SEQ ID NO: 1270 - DNA, 51 bp, synthetic construct
  misc_feature 1..51: note = Synthetic polynucleotide
  source 1..51: mol_type = other DNA
attctctgaagaaatcacttctggcygtcagttgcaaaaaaaggagatcca

SEQ ID NO: 1271 - DNA, 51 bp, synthetic construct
  misc_feature 1..51: note = Synthetic polynucleotide
  source 1..51: mol_type = other DNA
acacagatgctaaaactgcagaatcygggtaatttggaaagaaagggtcaa

SEQ ID NO: 1272 - DNA, 51 bp, synthetic construct
  misc_feature 1..51: note = Synthetic polynucleotide
  source 1..51: mol_type = other DNA
gaaagggtgtttattcctcatggacyaattatggacaggtaagtaagatct

SEQ ID NO: 1273 - DNA, 51 bp, synthetic construct
  misc_feature 1..51: note = Synthetic polynucleotide
  source 1..51: mol_type = other DNA
cttgctcgagatgtgatgaaggagaygggaggccatcacattgtagccctc

SEQ ID NO: 1274 - DNA, 51 bp, synthetic construct
  misc_feature 1..51: note = Synthetic polynucleotide
  source 1..51: mol_type = other DNA
attcgcagcactcttcgcatggagtygatgggctgtgatttaaatagtaag

SEQ ID NO: 1275 - DNA, 51 bp, synthetic construct
  misc_feature 1..51: note = Synthetic polynucleotide
  source 1..51: mol_type = other DNA
ggaccttggacagtttctactgtttygtcatatctcttcccaccaacatgg

SEQ ID NO: 1276 - DNA, 51 bp, synthetic construct
  misc_feature 1..51: note = Synthetic polynucleotide
  source 1..51: mol_type = other DNA
agagcagaagttgaagataatatcayggtgagttaaggacagtggaattac

SEQ ID NO: 1277 - DNA, 51 bp, synthetic construct
  misc_feature 1..51: note = Synthetic polynucleotide
  source 1..51: mol_type = other DNA
cctttcaatatatgtaattaacagayaatgtcagacaagaggaatgtcatc

SEQ ID NO: 1278 - DNA, 51 bp, synthetic construct
  misc_feature 1..51: note = Synthetic polynucleotide
  source 1..51: mol_type = other DNA
tccttggaaatctcgccaataacttyccttactgctcaaacactcttgatg

SEQ ID NO: 1279 - DNA, 51 bp, synthetic construct
  misc_feature 1..51: note = Synthetic polynucleotide
  source 1..51: mol_type = other DNA
ttgatggaccttggacagtttctacygttttgtcatatctcttcccaccaa

SEQ ID NO: 1280 - DNA, 51 bp, synthetic construct
  misc_feature 1..51: note = Synthetic polynucleotide
  source 1..51: mol_type = other DNA
ctctccttcctttatccaaattcgcycagttgccaagaagcatcctaaaac

SEQ ID NO: 1281 - DNA, 51 bp, synthetic construct
  misc_feature 1..51: note = Synthetic polynucleotide
  source 1..51: mol_type = other DNA
atcaggaatcttgggacctttacttyatggggaagttggagacacactgtt

SEQ ID NO: 1282 - DNA, 51 bp, synthetic construct
  misc_feature 1..51: note = Synthetic polynucleotide
  source 1..51: mol_type = other DNA
aatcaagcaagcagaccatataacayctaccctcacggaatcactgatgtc

SEQ ID NO: 1283 - DNA, 51 bp, synthetic construct
  misc_feature 1..51: note = Synthetic polynucleotide
  source 1..51: mol_type = other DNA
ccctctcctcatctgctacaaagaayctgtagatcaaagaggaaaccaggt

SEQ ID NO: 1284 - DNA, 51 bp, synthetic construct
  misc_feature 1..51: note = Synthetic polynucleotide
  source 1..51: mol_type = other DNA
cagttgtcagtttgtttgcatgaggyggcatactggtacattctaagcatt

SEQ ID NO: 1285 - DNA, 51 bp, synthetic construct
  misc_feature 1..51: note = Synthetic polynucleotide
  source 1..51: mol_type = other DNA
ttctgtcttcttctctggatataccytcaaacacaaaatggtctatgaaga

SEQ ID NO: 1286 - DNA, 51 bp, synthetic construct
  misc_feature 1..51: note = Synthetic polynucleotide
  source 1..51: mol_type = other DNA
gtttctttacttgggcaaaggacagygggccccaaagctggccagacttca

SEQ ID NO: 1287 - DNA, 51 bp, synthetic construct
  misc_feature 1..51: note = Synthetic polynucleotide
  source 1..51: mol_type = other DNA
gtgtacgagaaaatgtggtcttacaygaaatcagcggagccatctgtgttt

SEQ ID NO: 1288 - DNA, 51 bp, synthetic construct
  misc_feature 1..51: note = Synthetic polynucleotide
  source 1..51: mol_type = other DNA
gagggcgaggccaccaaagggtaccyggacgaccccacggtgccccgcggg

SEQ ID NO: 1289 - DNA, 51 bp, synthetic construct
  misc_feature 1..51: note = Synthetic polynucleotide
  source 1..51: mol_type = other DNA
tggagagggcgaggccaccaaagggyacctggacgaccccacggtgccccg

SEQ ID NO: 1290 - DNA, 51 bp, synthetic construct
  misc_feature 1..51: note = Synthetic polynucleotide
  source 1..51: mol_type = other DNA
ggtccacatctcagggacactgtggyggacctatgtcatcagcgtggtgtt

SEQ ID NO: 1291 - DNA, 51 bp, synthetic construct
  misc_feature 1..51: note = Synthetic polynucleotide
  source 1..51: mol_type = other DNA
tcagggacactgtggtggacctatgycatcagcgtggtgttccggctgttg

SEQ ID NO: 1292 - DNA, 51 bp, synthetic construct
  misc_feature 1..51: note = Synthetic polynucleotide
  source 1..51: mol_type = other DNA
tgtgtccgtctggtgtagtaatgatyacctgggcatgagccgacaccctca

SEQ ID NO: 1293 - DNA, 51 bp, synthetic construct
  misc_feature 1..51: note = Synthetic polynucleotide
  source 1..51: mol_type = other DNA
ctggccccacggcctgaagacttcaygcggcccagacgtgttcagcggcag

SEQ ID NO: 1294 - DNA, 51 bp, synthetic construct; identical to SEQ ID NO: 1293
  misc_feature 1..51: note = Synthetic polynucleotide
  source 1..51: mol_type = other DNA

SEQ ID NO: 1295 - DNA, 51 bp, synthetic construct
  misc_feature 1..51: note = Synthetic polynucleotide
  source 1..51: mol_type = other DNA
ggccatcgtgggcattgccttctccyggatctgggctgctgtgtggacagc

SEQ ID NO: 1296 - DNA, 51 bp, synthetic construct
  misc_feature 1..51: note = Synthetic polynucleotide
  source 1..51: mol_type = other DNA
gctgttgtacagtgcctgcttctgghggctgttttgctatgcagtggatgc

SEQ ID NO: 1297 - DNA, 51 bp, synthetic construct
  misc_feature 1..51: note = Synthetic polynucleotide
  source 1..51: mol_type = other DNA
agaatcaccaggcctcatcaccatcygccttttaggatatctactcagtgc

SEQ ID NO: 1298 - DNA, 51 bp, synthetic construct
  misc_feature 1..51: note = Synthetic polynucleotide
  source 1..51: mol_type = other DNA
ttcctcaaatttggatctggctatgyaagtggctggggaagagtcttccac

SEQ ID NO: 1299 - DNA, 51 bp, synthetic construct
  misc_feature 1..51: note = Synthetic polynucleotide
  source 1..51: mol_type = other DNA
agttccacttgttgaccgagccacahgtcttcgatctacaaagttcaccat

SEQ ID NO: 1300 - DNA, 51 bp, synthetic construct
  misc_feature 1..51: note = Synthetic polynucleotide
  source 1..51: mol_type = other DNA
tgtgcaatgaaaggcaaatatggaayatataccaaggtatcccggtatgtc

SEQ ID NO: 1301 - DNA, 51 bp, synthetic construct
  misc_feature 1..51: note = Synthetic polynucleotide
  source 1..51: mol_type = other DNA
taccaaggtatcccggtatgtcaacyggattaaggaaaaaacaaagctcac

SEQ ID NO: 1302 - DNA, 51 bp, synthetic construct
  misc_feature 1..51: note = Synthetic polynucleotide
  source 1..51: mol_type = other DNA
tttaggatatctactcagtgctgaaygtacaggtttgtttccttttttaaa

SEQ ID NO: 1303 - DNA, 51 bp, synthetic construct
  misc_feature 1..51: note = Synthetic polynucleotide
  source 1..51: mol_type = other DNA
ctgaattttggaagcagtatgttggyaagcaattcattttatcctctagct

SEQ ID NO: 1304 - DNA, 51 bp, synthetic construct
  misc_feature 1..51: note = Synthetic polynucleotide
  source 1..51: mol_type = other DNA
attgctgacaaggaatacacgaacaycttcctcaaatttggatctggctat

SEQ ID NO: 1305 - DNA, 51 bp, synthetic construct
  misc_feature 1..51: note = Synthetic polynucleotide
  source 1..51: mol_type = other DNA
cattgatgcccagacctttgctgacyggggagtagatctgctaaaatttga

SEQ ID NO: 1306 - DNA, 51 bp, synthetic construct
  misc_feature 1..51: note = Synthetic polynucleotide
  source 1..51: mol_type = other DNA
ttatttcattctttttctcagttagygattggcaactttggcctcagctgg

SEQ ID NO: 1307 - DNA, 51 bp, synthetic construct
  misc_feature 1..51: note = Synthetic polynucleotide
  source 1..51: mol_type = other DNA
ccaacaaatgccaatctgactctctytgagtgctggagcagttcctctaat

SEQ ID NO: 1308 - DNA, 51 bp, synthetic construct
  misc_feature 1..51: note = Synthetic polynucleotide
  source 1..51: mol_type = other DNA
tatgatgctttgaactccatccaccyctacaccttcgacgtcgcatttgcg

SEQ ID NO: 1309 - DNA, 51 bp, synthetic construct
  misc_feature 1..51: note = Synthetic polynucleotide
  source 1..51: mol_type = other DNA
ttcaaggtgatgaggcttcgcaaacyggctcagcagattgcaaactgcaaa

SEQ ID NO: 1310 - DNA, 51 bp, synthetic construct
  misc_feature 1..51: note = Synthetic polynucleotide
  source 1..51: mol_type = other DNA
cagtatcgggatgccctttacaagtycatggtggatactgccgtgctttta

SEQ ID NO: 1311 - DNA, 51 bp, synthetic construct
  misc_feature 1..51: note = Synthetic polynucleotide
  source 1..51: mol_type = other DNA
ctcataggatttccagcaggagagcyccagaagcctttcttttggggaaca

SEQ ID NO: 1312 - DNA, 51 bp, synthetic construct
  misc_feature 1..51: note = Synthetic polynucleotide
  source 1..51: mol_type = other DNA
agaaagtgaaattcgttattctacayggaagaaagctgtgatgaagtcaat

SEQ ID NO: 1313 - DNA, 51 bp, synthetic construct
  misc_feature 1..51: note = Synthetic polynucleotide
  source 1..51: mol_type = other DNA
aactgctgggcgtccctgctcatgcytgagctggcccaggaccgcttgcag

SEQ ID NO: 1314 - DNA, 51 bp, synthetic construct
  misc_feature 1..51: note = Synthetic polynucleotide
  source 1..51: mol_type = other DNA
cttctgggaggacatccttgttttcytaccacacaagatattcatttgggt

SEQ ID NO: 1315 - DNA, 51 bp, synthetic construct
  misc_feature 1..51: note = Synthetic polynucleotide
  source 1..51: mol_type = other DNA
ctgaagggccgtgaccttctcactcyaaaaaactttaccggagaagaaatt

SEQ ID NO: 1316 - DNA, 51 bp, synthetic construct
  misc_feature 1..51: note = Synthetic polynucleotide
  source 1..51: mol_type = other DNA
ttggcagagcagtatgccaaagaggyatgctctttacatgtaaagctatta

SEQ ID NO: 1317 - DNA, 51 bp, synthetic construct
  misc_feature 1..51: note = Synthetic polynucleotide
  source 1..51: mol_type = other DNA
cctccacctgctgacgttgtgctgcyacctagagttgcgctcggagttgcg

SEQ ID NO: 1318 - DNA, 51 bp, synthetic construct
  misc_feature 1..51: note = Synthetic polynucleotide
  source 1..51: mol_type = other DNA
cattctaaaggcaatttaaaaatcaygtcaagctcagttgaacagaaaaaa

SEQ ID NO: 1319 - DNA, 51 bp, synthetic construct
  misc_feature 1..51: note = Synthetic polynucleotide
  source 1..51: mol_type = other DNA
catcacctatgccctgaccgttgtgyggctcctggtgtttgcctgctctgc

SEQ ID NO: 1320 - DNA, 51 bp, synthetic construct
  misc_feature 1..51: note = Synthetic polynucleotide
  source 1..51: mol_type = other DNA
cctggcaaggtttgtggctccaaccytctgtccatctgcaaaacagctgag

SEQ ID NO: 1321 - DNA, 51 bp, synthetic construct
  misc_feature 1..51: note = Synthetic polynucleotide
  source 1..51: mol_type = other DNA
aacacctggaccacctgccagtctaytgccttccccagcaagacctctgcc

SEQ ID NO: 1322 - DNA, 51 bp, synthetic construct
  misc_feature 1..51: note = Synthetic polynucleotide
  source 1..51: mol_type = other DNA
attttcctgcagttccaaatgacctyccacctgtttattgctgcatttgtg

SEQ ID NO: 1323 - DNA, 51 bp, synthetic construct
  misc_feature 1..51: note = Synthetic polynucleotide
  source 1..51: mol_type = other DNA
ctcccacttcttcagcttgggcaagygtgtgcctgtgtgccgaggtgagct

SEQ ID NO: 1324 - DNA, 51 bp, synthetic construct
  misc_feature 1..51: note = Synthetic polynucleotide
  source 1..51: mol_type = other DNA
cttcgtgaaggataacccccagaagycctacttcatccgcctttacggcct

SEQ ID NO: 1325 - DNA, 51 bp, synthetic construct
  misc_feature 1..51: note = Synthetic polynucleotide
  source 1..51: mol_type = other DNA
aacctcgacccagatctgcggagtcygttctccagggcaggaatcagcgag

SEQ ID NO: 1326 - DNA, 51 bp, synthetic construct
  misc_feature 1..51: note = Synthetic polynucleotide
  source 1..51: mol_type = other DNA
cttacatttcagaaccatcaagaaayggggacctggattttatttgcctgc

SEQ ID NO: 1327 - DNA, 51 bp, synthetic construct
  misc_feature 1..51: note = Synthetic polynucleotide
  source 1..51: mol_type = other DNA
accatgagcaacaacttggtaacccyggaaaatgggaaacagctgaccgtt

SEQ ID NO: 1328 - DNA, 51 bp, synthetic construct
  misc_feature 1..51: note = Synthetic polynucleotide
  source 1..51: mol_type = other DNA
tcctcctactgcatcgacagcatccygggccggaggagcccgtgcaaaatg

SEQ ID NO: 1329 - DNA, 51 bp, synthetic construct
  misc_feature 1..51: note = Synthetic polynucleotide
  source 1..51: mol_type = other DNA
tgatcatttctcctccagatcattcygcaatccatgcataagtacaaaccc

SEQ ID NO: 1330 - DNA, 51 bp, synthetic construct
  misc_feature 1..51: note = Synthetic polynucleotide
  source 1..51: mol_type = other DNA
ggtgaactccagaaagaagaagctayggccgcagtgattctggagagcatc

SEQ ID NO: 1331 - DNA, 51 bp, synthetic construct
  misc_feature 1..51: note = Synthetic polynucleotide
  source 1..51: mol_type = other DNA
aaggacctgaccttcttgaaggagcyggggactggacaatttggggtagtg

SEQ ID NO: 1332 - DNA, 51 bp, synthetic construct
  misc_feature 1..51: note = Synthetic polynucleotide
  source 1..51: mol_type = other DNA
gctgctagagatgtgcaaggatgtcygtgaagccatggaatacctggagtc

SEQ ID NO: 1333 - DNA, 51 bp, synthetic construct
  misc_feature 1..51: note = Synthetic polynucleotide
  source 1..51: mol_type = other DNA
gttgttaaagtatctgatttcggccygtccaggtgagtgtggctttttcat

SEQ ID NO: 1334 - DNA, 51 bp, synthetic construct
  misc_feature 1..51: note = Synthetic polynucleotide
  source 1..51: mol_type = other DNA
caagttcagcagcaaatctgacattygggcttttggtaagtggataagatt

SEQ ID NO: 1335 - DNA, 51 bp, synthetic construct
  misc_feature 1..51: note = Synthetic polynucleotide
  source 1..51: mol_type = other DNA
ttcaaaattcttctgagcaatattcyagatgtcatggatgaagaatcctga

SEQ ID NO: 1336 - DNA, 51 bp, synthetic construct
  misc_feature 1..51: note = Synthetic polynucleotide
  source 1..51: mol_type = other DNA
gatggacaatggattctaaactcttycttggatgccacccttacctcagtg

SEQ ID NO: 1337 - DNA, 51 bp, synthetic construct
  misc_feature 1..51: note = Synthetic polynucleotide
  source 1..51: mol_type = other DNA
gattcatccccaccctctgacagagytcctccacaacatggactacttcaa

SEQ ID NO: 1338 - DNA, 51 bp, synthetic construct
  misc_feature 1..51: note = Synthetic polynucleotide
  source 1..51: mol_type = other DNA
gacactcaatgagatctaccactggytcacacgcatgtttgccttcttcag

SEQ ID NO: 1339 - DNA, 51 bp, synthetic construct
  misc_feature 1..51: note = Synthetic polynucleotide
  source 1..51: mol_type = other DNA
ctgcgccacaacaacctgtccttcaycacgcccggcgccttcaagggcctg

SEQ ID NO: 1340 - DNA, 51 bp, synthetic construct
  misc_feature 1..51: note = Synthetic polynucleotide
  source 1..51: mol_type = other DNA
caccctgcagatacatgtcatggagygcattgagtagggccggccagtgca

SEQ ID NO: 1341 - DNA, 51 bp, synthetic construct
  misc_feature 1..51: note = Synthetic polynucleotide
  source 1..51: mol_type = other DNA
ccatactggcctcagcacctaagacyggacaactttgtacctaatgaccgc

SEQ ID NO: 1342 - DNA, 51 bp, synthetic construct
  misc_feature 1..51: note = Synthetic polynucleotide
  source 1..51: mol_type = other DNA
cttcggactctcaagcaggaaaacahtgtggagttgaaggaagcatttcgt

SEQ ID NO: 1343 - DNA, 51 bp, synthetic construct
  misc_feature 1..51: note = Synthetic polynucleotide
  source 1..51: mol_type = other DNA
gccttaattatttcacatatgaggtytattatgcttcatgacataagacaa

SEQ ID NO: 1344 - DNA, 51 bp, synthetic construct
  misc_feature 1..51: note = Synthetic polynucleotide
  source 1..51: mol_type = other DNA
agttacctttactaagaaggtaaggrtatgccccgcagtgacaaatgccga

SEQ ID NO: 1345 - DNA, 51 bp, synthetic construct
  misc_feature 1..51: note = Synthetic polynucleotide
  source 1..51: mol_type = other DNA
ggatccagctgaaaggatcactgttyatgaagcactgaatcacccatggct

SEQ ID NO: 1346 - DNA, 51 bp, synthetic construct
  misc_feature 1..51: note = Synthetic polynucleotide
  source 1..51: mol_type = other DNA
tgagctcgtgtgcacagccccacagygggtccctgtctcctgggtctatta

SEQ ID NO: 1347 - DNA, 51 bp, synthetic construct
  misc_feature 1..51: note = Synthetic polynucleotide
  source 1..51: mol_type = other DNA
aggggaggacttctactgcgtgactygccatgagaccaagtttgccaagca

SEQ ID NO: 1348 - DNA, 51 bp, synthetic construct
  misc_feature 1..51: note = Synthetic polynucleotide
  source 1..51: mol_type = other DNA
ggaggactcccccaagtgcaaggggygcttcaaggccattgtggcaggtac

SEQ ID NO: 1349 - DNA, 51 bp, synthetic construct
  misc_feature 1..51: note = Synthetic polynucleotide
  source 1..51: mol_type = other DNA
caccgctgtggaggaccagtattacygcgtggattgctacaagaactttgt

SEQ ID NO: 1350 - DNA, 51 bp, synthetic construct
  misc_feature 1..51: note = Synthetic polynucleotide
  misc_difference 26: note = n is a, c, g, t or u
  source 1..51: mol_type = other DNA
atacaacacgctgaagaatttcttancaaacctgaatccaaagttgctaag

SEQ ID NO: 1351 - DNA, 51 bp, synthetic construct
  misc_feature 1..51: note = Synthetic polynucleotide
  source 1..51: mol_type = other DNA
cttatttcttgccttaggggaaagcyatgtctgttcctcagacaacttctt

SEQ ID NO: 1352 - DNA, 51 bp, synthetic construct
  misc_feature 1..51: note = Synthetic polynucleotide
  source 1..51: mol_type = other DNA
atcctgttgaacgtgtttcttgccaytgctgtggacaacctggccagtgga

SEQ ID NO: 1353 - DNA, 51 bp, synthetic construct
  misc_feature 1..51: note = Synthetic polynucleotide
  source 1..51: mol_type = other DNA
acagggcagctggtaaagatgctacygtatacagaggtgactcgctacctg

SEQ ID NO: 1354 - DNA, 51 bp, synthetic construct
  misc_feature 1..51: note = Synthetic polynucleotide
  source 1..51: mol_type = other DNA
atcatggcccccattgcatttgagcyggtgggcccaatgcaggcctcacag

SEQ ID NO: 1355 - DNA, 51 bp, synthetic construct
  misc_feature 1..51: note = Synthetic polynucleotide
  source 1..51: mol_type = other DNA
ctccaggtcctttccttcctgctccygggcctgatgtccatgatgattccc

SEQ ID NO: 1356 - DNA, 51 bp, synthetic construct
  misc_feature 1..51: note = Synthetic polynucleotide
  source 1..51: mol_type = other DNA
ccccccatcatcggggctgtaatccycttcttcgtccctctgatgcatcaa

SEQ ID NO: 1357 - DNA, 51 bp, synthetic construct
  misc_feature 1..51: note = Synthetic polynucleotide
  source 1..51: mol_type = other DNA
gaaatgcttactggtacactcccttyccaaggaaaagatcgaaaagaaaca

SEQ ID NO: 1358 - DNA, 51 bp, synthetic construct
  misc_feature 1..51: note = Synthetic polynucleotide
  source 1..51: mol_type = other DNA
aagttttcttcatacagttcttttgygtgacaaactggatttcagcacggc

SEQ ID NO: 1359 - DNA, 51 bp, synthetic construct
  misc_feature 1..51: note = Synthetic polynucleotide
  source 1..51: mol_type = other DNA
gaagtggcttcgaaacattgactatyaccgtttagatggttccactactgc

SEQ ID NO: 1360 - DNA, 51 bp, synthetic construct
  misc_feature 1..51: note = Synthetic polynucleotide
  source 1..51: mol_type = other DNA
gatattaagaaggctcatcttgcatyggaagaagacttaaattccgagttt

SEQ ID NO: 1361 - DNA, 51 bp, synthetic construct
  misc_feature 1..51: note = Synthetic polynucleotide
  source 1..51: mol_type = other DNA
cagtccctcatatctctggacttgaytgaagattttcttgaattagctagt

SEQ ID NO: 1362 - DNA, 51 bp, synthetic construct
  misc_feature 1..51: note = Synthetic polynucleotide
  source 1..51: mol_type = other DNA
aggtggggtgactcggatgactgttyctcttgttgtcataatgtttgaact

SEQ ID NO: 1363 - DNA, 51 bp, synthetic construct
  misc_feature 1..51: note = Synthetic polynucleotide
  source 1..51: mol_type = other DNA
gacacatccctggaccctaatgattbtgacttcacggtaactgggagaggg

SEQ ID NO: 1364 - DNA, 51 bp, synthetic construct
  misc_feature 1..51: note = Synthetic polynucleotide
  source 1..51: mol_type = other DNA
tgcctcggggtgcgtctagggctgcytgaggtcaagttgacactgctccac

SEQ ID NO: 1365 - DNA, 51 bp, synthetic construct
  misc_feature 1..51: note = Synthetic polynucleotide
  source 1..51: mol_type = other DNA
ttttttattcctcccaggtactatcytggtcgtcggatgtttattgttatt

SEQ ID NO: 1366 - DNA, 51 bp, synthetic construct
  misc_feature 1..51: note = Synthetic polynucleotide
  source 1..51: mol_type = other DNA
ttcttcattttaccatgacactgatytcttgggagaagaactggatattgt

SEQ ID NO: 1367 - DNA, 51 bp, synthetic construct
  misc_feature 1..51: note = Synthetic polynucleotide
  source 1..51: mol_type = other DNA
ggtagtctgcacttaccacccaagaygtttactcttcactttcacggcgga

SEQ ID NO: 1368 - DNA, 51 bp, synthetic construct
  misc_feature 1..51: note = Synthetic polynucleotide
  source 1..51: mol_type = other DNA
agccccgacggcgagtggcggcgccygggccggcccgtcttccccacggca

SEQ ID NO: 1369 - DNA, 51 bp, synthetic construct
  misc_feature 1..51: note = Synthetic polynucleotide
  source 1..51: mol_type = other DNA
atcgtggcccccctcctgacctcaayagatgccatctccctggagtgtgag

SEQ ID NO: 1370 - DNA, 51 bp, synthetic construct
  misc_feature 1..51: note = Synthetic polynucleotide
  source 1..51: mol_type = other DNA
ttatgcttatagggaagaacagcttygcattggtcctgcaacaatggatac

SEQ ID NO: 1371 - DNA, 51 bp, synthetic construct
  misc_feature 1..51: note = Synthetic polynucleotide
  source 1..51: mol_type = other DNA
gactacaattgtgtgccatcagtgayttacacacaccctgaagttgcttgg

SEQ ID NO: 1372 - DNA, 51 bp, synthetic construct
  misc_feature 1..51: note = Synthetic polynucleotide
  source 1..51: mol_type = other DNA
gggcaggggacggtggccgcggccaygcagtcctgtgccagggcgtggggg

SEQ ID NO: 1373 - DNA, 51 bp, synthetic construct
  misc_feature 1..51: note = Synthetic polynucleotide
  source 1..51: mol_type = other DNA
agactggctcaacctcgtctttaagyggtaagaaccatatagagaggagat

SEQ ID NO: 1374 - DNA, 51 bp, synthetic construct
  misc_feature 1..51: note = Synthetic polynucleotide
  source 1..51: mol_type = other DNA
ccgagagtcctggtgactttgaacaygctggtgccgctagccaagctgtcc

SEQ ID NO: 1375 - DNA, 51 bp, synthetic construct
  misc_feature 1..51: note = Synthetic polynucleotide
  source 1..51: mol_type = other DNA
ctggcccgagagctccttaaagagcygcgaactcaagtctagaaggcacgc

SEQ ID NO: 1376 - DNA, 51 bp, synthetic construct
  misc_feature 1..51: note = Synthetic polynucleotide
  source 1..51: mol_type = other DNA
gccctcaggctcctctgccttctgcytgggcttcagggctgcctggctgca

SEQ ID NO: 1377 - DNA, 51 bp, synthetic construct
  misc_feature 1..51: note = Synthetic polynucleotide
  source 1..51: mol_type = other DNA
cccctctgcctgcccgaacggacgtyctctgagaggacgctggccttcgtg

SEQ ID NO: 1378 - DNA, 51 bp, synthetic construct
  misc_feature 1..51: note = Synthetic polynucleotide
  source 1..51: mol_type = other DNA
acaacccgtcctgtcctggggctgcyggtctgcttcctgtacaacgaggcg

SEQ ID NO: 1379 - DNA, 51 bp, synthetic construct
  misc_feature 1..51: note = Synthetic polynucleotide
  source 1..51: mol_type = other DNA
tgcgcggacgagctgggctgcttcgygggcacggctgaggcgctgcgctgc

SEQ ID NO: 1380 - DNA, 51 bp, synthetic construct
  misc_feature 1..51: note = Synthetic polynucleotide
  source 1..51: mol_type = other DNA
cctactggccttctcctccgcgtgcyacttccagaactgcccgaggggcgg

SEQ ID NO: 1381 - DNA, 51 bp, synthetic construct
  misc_feature 1..51: note = Synthetic polynucleotide
  source 1..51: mol_type = other DNA
gggactcagaggagcgggcaggtgcytgaggtggctggcaccaaggcgatt

SEQ ID NO: 1382 - DNA, 51 bp, synthetic construct
  misc_feature 1..51: note = Synthetic polynucleotide
  source 1..51: mol_type = other DNA
gggcggtgcgcgcatggccgagaccbgcgtgccagtcctgcgctgcaacac

SEQ ID NO: 1383 - DNA, 51 bp, synthetic construct
  misc_feature 1..51: note = Synthetic polynucleotide
  source 1..51: mol_type = other DNA
tagccactgccacgccctggccacaygtgtcaatgtggtgggcagctactt

SEQ ID NO: 1384 - DNA, 51 bp, synthetic construct
  misc_feature 1..51: note = Synthetic polynucleotide
  source 1..51: mol_type = other DNA
caaatcgaataatggcagatggcacygccagtgcaaacaggacttcaacat

SEQ ID NO: 1385 - DNA, 51 bp, synthetic construct
  misc_feature 1..51: note = Synthetic polynucleotide
  source 1..51: mol_type = other DNA
aatcagaactcgaatggccttgtttycttgctctggggctcttatgctcag

SEQ ID NO: 1386 - DNA, 51 bp, synthetic construct
  misc_feature 1..51: note = Synthetic polynucleotide
  source 1..51: mol_type = other DNA
caggtgtaccgccagcgcaggaagcygattgctgagatcgccttccagtac

SEQ ID NO: 1387 - DNA, 51 bp, synthetic construct
  misc_feature 1..51: note = Synthetic polynucleotide
  source 1..51: mol_type = other DNA
ccaccctcaaaataattcgatttgcygtaccaagtgccacaaaggtagggg

SEQ ID NO: 1388 - DNA, 51 bp, synthetic construct
  misc_feature 1..51: note = Synthetic polynucleotide
  source 1..51: mol_type = other DNA
aatgggtcaggtggagatctcttctygcacagtggaccgggacaccgtgtg

SEQ ID NO: 1389 - DNA, 51 bp, synthetic construct
  misc_feature 1..51: note = Synthetic polynucleotide
  source 1..51: mol_type = other DNA
ggcggcatgaaccggaggcccatccycaccatcatcacactggaagactcc

SEQ ID NO: 1390 - DNA, 51 bp, synthetic construct
  misc_feature 1..51: note = Synthetic polynucleotide
  source 1..51: mol_type = other DNA
cagtactcccctgccctcaacaagaygttttgccaactggccaagacctgc

SEQ ID NO: 1391 - DNA, 51 bp, synthetic construct
  misc_feature 1..51: note = Synthetic polynucleotide
  source 1..51: mol_type = other DNA
gagcgcttcgagatgttccgagagcygaatgaggccttggaactcaaggat

SEQ ID NO: 1392 - DNA, 51 bp, synthetic construct
  misc_feature 1..51: note = Synthetic polynucleotide
  source 1..51: mol_type = other DNA
tctctgaacagacgcatccagctggytgaggaagagttggatcgtgcccag

SEQ ID NO: 1393 - DNA, 51 bp, synthetic construct
  misc_feature 1..51: note = Synthetic polynucleotide
  source 1..51: mol_type = other DNA
gggtggtgcttccctcaagcccgaaytcgtggacatcatcaatgccaaaca

SEQ ID NO: 1394 - DNA, 51 bp, synthetic construct
  misc_feature 1..51: note = Synthetic polynucleotide
  source 1..51: mol_type = other DNA
aagcatgagaacatactccagttccygacggctgaggagcggaagacggag

SEQ ID NO: 1395 - DNA, 51 bp, synthetic construct
  misc_feature 1..51: note = Synthetic polynucleotide
  source 1..51: mol_type = other DNA
ctttcgccttagcgcccactgctccygtgacagcagggataacacactgca

SEQ ID NO: 1396 - DNA, 51 bp, synthetic construct
  misc_feature 1..51: note = Synthetic polynucleotide
  source 1..51: mol_type = other DNA
gctgcccgaggccgtgctcgccctgyacaacagcacccgcgaccgggtggc

SEQ ID NO: 1397 - DNA, 51 bp, synthetic construct
  misc_feature 1..51: note = Synthetic polynucleotide
  misc_difference 26: note = n is a, c, g, t or u
  source 1..51: mol_type = other DNA
tgagggctttcgccttagcgcccacngctcctgtgacagcagggataacac

SEQ ID NO: 1398 - DNA, 51 bp, synthetic construct
  misc_feature 1..51: note = Synthetic polynucleotide
  source 1..51: mol_type = other DNA
atcatcctcctcaaaggctgctgcayggagatcatgtcccttcgcgctgct

SEQ ID NO: 1399 - DNA, 51 bp, synthetic construct
  misc_feature 1..51: note = Synthetic polynucleotide
  source 1..51: mol_type = other DNA
ccgcttcctgcacatgaaggtggaaygccccacagaactcttccccccttt

SEQ ID NO: 1400 - DNA, 51 bp, synthetic construct
  misc_feature 1..51: note = Synthetic polynucleotide
  source 1..51: mol_type = other DNA
ctcttcccccctttgttcttggaagygttcgaggattagactgactggatt

SEQ ID NO: 1401 - DNA, 51 bp, synthetic construct
  misc_feature 1..51: note = Synthetic polynucleotide
  source 1..51: mol_type = other DNA
gaagcacaagctgggcgggggccagyacggggaggtgtacgagggcgtgtg

SEQ ID NO: 1402 - DNA, 51 bp, synthetic construct
  misc_feature 1..51: note = Synthetic polynucleotide
  source 1..51: mol_type = other DNA
aggggtctgcacccgggagcccccgytctatatcatcactgagttcatgac

SEQ ID NO: 1403 - DNA, 51 bp, synthetic construct
  misc_feature 1..51: note = Synthetic polynucleotide
  source 1..51: mol_type = other DNA
atggccactcagatctcgtcagccayggagtacctggagaagaaaaacttc

SEQ ID NO: 1404 - DNA, 51 bp, synthetic construct
  misc_feature 1..51: note = Synthetic polynucleotide
  source 1..51: mol_type = other DNA
tgaacacggagcacaacatcatattyacaggcttgtaaaggactgaacatg

SEQ ID NO: 1405 - DNA, 51 bp, synthetic construct
  misc_feature 1..51: note = Synthetic polynucleotide
  source 1..51: mol_type = other DNA
tggatacccatccccgacagtgacahggtacagggaagactaccaaatcga

SEQ ID NO: 1406 - DNA, 51 bp, synthetic construct
  misc_feature 1..51: note = Synthetic polynucleotide
  source 1..51: mol_type = other DNA
gaaaacacagatgacctgacaacccygatcatcatggacgtacagaaacaa

SEQ ID NO: 1407 - DNA, 51 bp, synthetic construct
  misc_feature 1..51: note = Synthetic polynucleotide
  source 1..51: mol_type = other DNA
ccccacaggctctgccatgcagcagygccaattgctgtgccgccagggctc

SEQ ID NO: 1408 - DNA, 51 bp, synthetic construct
  misc_feature 1..51: note = Synthetic polynucleotide
  source 1..51: mol_type = other DNA
tctctctcccacaggcccgacaaccygcgagaaatctcgaaccagtgggct

SEQ ID NO: 1409 - DNA, 51 bp, synthetic construct
  misc_feature 1..51: note = Synthetic polynucleotide
  source 1..51: mol_type = other DNA
cgggtgctggcggcaggcaaaggggyaaggctgtggagtccagtcagagga

SEQ ID NO: 1410 - DNA, 51 bp, synthetic construct
  misc_feature 1..51: note = Synthetic polynucleotide
  source 1..51: mol_type = other DNA
gccttatttgaagaagaaggatgaayctcaggaaggcaagcagcagtatct

SEQ ID NO: 1411 - DNA, 51 bp, synthetic construct
  misc_feature 1..51: note = Synthetic polynucleotide
  source 1..51: mol_type = other DNA
ccgttcatcgacgaggctaagcggcygcgagcgctgcacatgaaggagcac

SEQ ID NO: 1412 - DNA, 51 bp, synthetic construct
  misc_feature 1..51: note = Synthetic polynucleotide
  source 1..51: mol_type = other DNA
taatgtcaccaactttacctccagcyggaaggatggcttggcctttaatgc

SEQ ID NO: 1413 - DNA, 51 bp, synthetic construct
  misc_feature 1..51: note = Synthetic polynucleotide
  source 1..51: mol_type = other DNA
ggtgtgccagttctcgagggatgccyctgtggctgaggcgtggctgattgc

SEQ ID NO: 1414 - DNA, 51 bp, synthetic construct
  misc_feature 1..51: note = Synthetic polynucleotide
  source 1..51: mol_type = other DNA
ttggctctccagagacagaaagctcbgtccaatgctgcaaacttacaacga

SEQ ID NO: 1415 - DNA, 51 bp, synthetic construct
  misc_feature 1..51: note = Synthetic polynucleotide
  source 1..51: mol_type = other DNA
ggctctccagagacagaaagctctgyccaatgctgcaaacttacaacgatt

SEQ ID NO: 1416 - DNA, 51 bp, synthetic construct
  misc_feature 1..51: note = Synthetic polynucleotide
  source 1..51: mol_type = other DNA
aaatttgaagacttccaagtggagcyggtagctaaagaagggagagttgtt

SEQ ID NO: 1417 - DNA, 51 bp, synthetic construct
  misc_feature 1..51: note = Synthetic polynucleotide
  source 1..51: mol_type = other DNA
cgagattcagaagaatattgatggtygggagggaaaagacattggacagtg

SEQ ID NO: 1418 - DNA, 51 bp, synthetic construct
  misc_feature 1..51: note = Synthetic polynucleotide
  source 1..51: mol_type = other DNA
tgtggaagaaggcagaggaaaacaayggtggaacctgagaaggacgtgttt

SEQ ID NO: 1419 - DNA, 51 bp, synthetic construct
  misc_feature 1..51: note = Synthetic polynucleotide
  source 1..51: mol_type = other DNA
tttgggtatctctctttgcttcaagytgtaagtgaacactattttctctga

SEQ ID NO: 1420 - DNA, 51 bp, synthetic construct
  misc_feature 1..51: note = Synthetic polynucleotide
  source 1..51: mol_type = other DNA
actattttgacaaactgtgtgtttahgacaatgagtaaccctcctgattgg

SEQ ID NO: 1421 - DNA, 51 bp, synthetic construct
  misc_feature 1..51: note = Synthetic polynucleotide
  source 1..51: mol_type = other DNA
tctatactttggaggtcaagacatcyttatgacagaagaacagaagaaata

SEQ ID NO: 1422 - DNA, 51 bp, synthetic construct
  misc_feature 1..51: note = Synthetic polynucleotide
  source 1..51: mol_type = other DNA
gggctggaggtgggcaagacgcccahcgccatcgagattgagcacttcatc

SEQ ID NO: 1423 - DNA, 51 bp, synthetic construct
  misc_feature 1..51: note = Synthetic polynucleotide
  source 1..51: mol_type = other DNA
cagcaatatcccggagatcacgcccytcctgctgttcatcatggccaacat

SEQ ID NO: 1424 - DNA, 51 bp, synthetic construct
  misc_feature 1..51: note = Synthetic polynucleotide
  source 1..51: mol_type = other DNA
cctcagaatctccccacaggccgccygatctttgacaacttgaagaaatcc

SEQ ID NO: 1425 - DNA, 51 bp, synthetic construct
  misc_feature 1..51: note = Synthetic polynucleotide
  source 1..51: mol_type = other DNA
acggctactgggaatccgcctcgacygggatgaccggaccatgaatgatct

SEQ ID NO: 1426 - DNA, 51 bp, synthetic construct
  misc_feature 1..51: note = Synthetic polynucleotide
  source 1..51: mol_type = other DNA
aagaaggctgacattggcattgccaygggcatctctggctctgacgtctct

SEQ ID NO: 1427 - DNA, 51 bp, synthetic construct
  misc_feature 1..51: note = Synthetic polynucleotide
  source 1..51: mol_type = other DNA
gggcggacacccatagcaatggagaytgaacacttcatccagctgatcaca

SEQ ID NO: 1428 - DNA, 51 bp, synthetic construct
  misc_feature 1..51: note = Synthetic polynucleotide
  source 1..51: mol_type = other DNA
atgtttatggtttattttaggggccytgatgctctcagcaagaaagcgaag

SEQ ID NO: 1429 - DNA, 51 bp, synthetic construct
  misc_feature 1..51: note = Synthetic polynucleotide
  source 1..51: mol_type = other DNA
gtgggtgtccgggctggcggaggcaytggggacgagatcgaggaccccgcg

SEQ ID NO: 1430 - DNA, 51 bp, synthetic construct
  misc_feature 1..51: note = Synthetic polynucleotide
  source 1..51: mol_type = other DNA
gttctccatgctggccgcctacatgyttctgctgatcgtgctgggcttccc

SEQ ID NO: 1431 - DNA, 51 bp, synthetic construct
  misc_feature 1..51: note = Synthetic polynucleotide
  source 1..51: mol_type = other DNA
ctctttcactgttttataaaaaaggytagtagatgattattttcaagagca

SEQ ID NO: 1432 - DNA, 51 bp, synthetic construct
  misc_feature 1..51: note = Synthetic polynucleotide
  source 1..51: mol_type = other DNA
tatgatgtgttccatgtatggcataygcaaagtgaagaatatagaccttaa

SEQ ID NO: 1433 - DNA, 51 bp, synthetic construct
  misc_feature 1..51: note = Synthetic polynucleotide
  source 1..51: mol_type = other DNA
agatttgagtttgtttataattactyatatttagccaatttacgtgagaac

SEQ ID NO: 1434 - DNA, 51 bp, synthetic construct
  misc_feature 1..51: note = Synthetic polynucleotide
  source 1..51: mol_type = other DNA
attcagtggatcagcaatcgctaccyggacttttcctccaaagaagtcaaa

SEQ ID NO: 1435 - DNA, 51 bp, synthetic construct
  misc_feature 1..51: note = Synthetic polynucleotide
  source 1..51: mol_type = other DNA
caacccggactacacttggcaagcayggcgctactgaaagtcaagtttgac

SEQ ID NO: 1436 - DNA, 51 bp, synthetic construct
  misc_feature 1..51: note = Synthetic polynucleotide
  source 1..51: mol_type = other DNA
actgagggtcccagccctggagactyccgctactcagatgggacccctgta

SEQ ID NO: 1437 - DNA, 51 bp, synthetic construct
  misc_feature 1..51: note = Synthetic polynucleotide
  source 1..51: mol_type = other DNA
tttccccaggttctggagatgagcahtggggcgccggaagcccagcaacgc

SEQ ID NO: 1438 - DNA, 51 bp, synthetic construct
  misc_feature 1..51: note = Synthetic polynucleotide
  source 1..51: mol_type = other DNA
agcaccctgtgtggcgaggtgccgcyctactacatctaggacgcctccggt

SEQ ID NO: 1439 - DNA, 51 bp, synthetic construct
  misc_feature 1..51: note = Synthetic polynucleotide
  source 1..51: mol_type = other DNA
ctcactgacatgccagacatattacytgaacttggacaatttaaaaaaacc

SEQ ID NO: 1440 - DNA, 51 bp, synthetic construct
  misc_feature 1..51: note = Synthetic polynucleotide
  source 1..51: mol_type = other DNA
ccccaccttctgcgaccactgtggcyccctcctctacgggcttgtgcacca

SEQ ID NO: 1441 - DNA, 51 bp, synthetic construct
  misc_feature 1..51: note = Synthetic polynucleotide
  source 1..51: mol_type = other DNA
acagtgtggccgcagcggcgagaacyttgacaagttcttcacgcgggcggc

SEQ ID NO: 1442 - DNA, 51 bp, synthetic construct
  misc_feature 1..51: note = Synthetic polynucleotide
  source 1..51: mol_type = other DNA
tgtaacttttgaggacgctggggaayatacgtgcttggcgggtaattctat

SEQ ID NO: 1443 - DNA, 51 bp, synthetic construct
  misc_feature 1..51: note = Synthetic polynucleotide
  source 1..51: mol_type = other DNA
ttttgaggacgctggggaatatacghgcttggcgggtaattctattgggat

SEQ ID NO: 1444 - DNA, 51 bp, synthetic construct
  misc_feature 1..51: note = Synthetic polynucleotide
  source 1..51: mol_type = other DNA
cagtgatgcccagccccacatccagbggatcaagcacgtggaaaagaacgg

SEQ ID NO: 1445 - DNA, 51 bp, synthetic construct
  misc_feature 1..51: note = Synthetic polynucleotide
  source 1..51: mol_type = other DNA
ccaagccggactgccggcaaatgccyccacagtggtcggaggagacgtaga

SEQ ID NO: 1446 - DNA, 51 bp, synthetic construct
  misc_feature 1..51: note = Synthetic polynucleotide
  source 1..51: mol_type = other DNA
cctgctgcccctcccaggcaggtgaygcttttccggaagagtccccaggag

SEQ ID NO: 1447 - DNA, 51 bp, synthetic construct
  misc_feature 1..51: note = Synthetic polynucleotide
  source 1..51: mol_type = other DNA
ttcattattttaaatagataatgtabccagtgctgagggttggcatgtaaa

SEQ ID NO: 1448 - DNA, 51 bp, synthetic construct
  misc_feature 1..51: note = Synthetic polynucleotide
  misc_difference 26: note = n is a, c, g, t or u
  source 1..51: mol_type = other DNA
tgaccgtggtctctttttcttctagntgatcataccagggttgtcctacac

SEQ ID NO: 1449 - DNA, 51 bp, synthetic construct
  misc_feature 1..51: note = Synthetic polynucleotide
  source 1..51: mol_type = other DNA
cagcagcgaaagcgccttgaggcctytcttacccagaagcagaaggtggga

SEQ ID NO: 1450 - DNA, 51 bp, synthetic construct
  misc_feature 1..51: note = Synthetic polynucleotide
  source 1..51: mol_type = other DNA
gcttttgacaaaatgtgctcgaagcygccgaagtccctgtcggaagagtgc

SEQ ID NO: 1451 - DNA, 51 bp, synthetic construct
  misc_feature 1..51: note = Synthetic polynucleotide
  source 1..51: mol_type = other DNA
tacctagtgtgcggggaacgaggctbcttctacacacccaagacccgccgg

SEQ ID NO: 1452 - DNA, 51 bp, synthetic construct
  misc_feature 1..51: note = Synthetic polynucleotide
  source 1..51: mol_type = other DNA
accacaaccaccaagggggagaactycaccgagaccgacgttaagatgatg

SEQ ID NO: 1453 - DNA, 51 bp, synthetic construct
  misc_feature 1..51: note = Synthetic polynucleotide
  source 1..51: mol_type = other DNA
ggcagtcctgccatcaatgtggccgbgcatgtgttcagaaaggctgctgat

SEQ ID NO: 1454 - DNA, 51 bp, synthetic construct
  misc_feature 1..51: note = Synthetic polynucleotide
  source 1..51: mol_type = other DNA
aggaaaaccagtgagtctggagagcygcatgggctcacaactgaggaggaa

SEQ ID NO: 1455 - DNA, 51 bp, synthetic construct
  misc_feature 1..51: note = Synthetic polynucleotide
  source 1..51: mol_type = other DNA
cacccagggcaccggtgaatccaagygtcctctgatggtcaaagttctaga

SEQ ID NO: 1456 - DNA, 51 bp, synthetic construct
  misc_feature 1..51: note = Synthetic polynucleotide
  source 1..51: mol_type = other DNA
gaatttgtagaagggatatacaaagyggaaatagacaccaaatcttactgg

SEQ ID NO: 1457 - DNA, 51 bp, synthetic construct
  misc_feature 1..51: note = Synthetic polynucleotide
  source 1..51: mol_type = other DNA
caccattgccgccctgctgagccccyactcctattccaccacggctgtcgt

SEQ ID NO: 1458 - DNA, 51 bp, synthetic construct
  misc_feature 1..51: note = Synthetic polynucleotide
  source 1..51: mol_type = other DNA
gcatgggctcacaactgaggaggaayttgtagaagggatatacaaagtgga

SEQ ID NO: 1459 - DNA, 51 bp, synthetic construct
  misc_feature 1..51: note = Synthetic polynucleotide
  source 1..51: mol_type = other DNA
tgccatcaatgtggccgtgcatgtghtcagaaaggctgctgatgacacctg

SEQ ID NO: 1460 - DNA, 51 bp, synthetic construct
  misc_feature 1..51: note = Synthetic polynucleotide
  source 1..51: mol_type = other DNA
ggcaccggtgaatccaagtgtcctcygatggtcaaagttctagatgctgtc

SEQ ID NO: 1461 - DNA, 51 bp, synthetic construct
  misc_feature 1..51: note = Synthetic polynucleotide
  source 1..51: mol_type = other DNA
gctgctgatgacacctgggagccatytgcctctgggtaagttgccaaagaa

SEQ ID NO: 1462 - DNA, 51 bp, synthetic construct
  misc_feature 1..51: note = Synthetic polynucleotide
  source 1..51: mol_type = other DNA
tgaggaggaatttgtagaagggatayacaaagtggaaatagacaccaaatc

SEQ ID NO: 1463 - DNA, 51 bp, synthetic construct
  misc_feature 1..51: note = Synthetic polynucleotide
  source 1..51: mol_type = other DNA
attgccctgcccgtacctgtcattgygtccaatttcaactatttctaccac

SEQ ID NO: 1464 - DNA, 51 bp, synthetic construct
  misc_feature 1..51: note = Synthetic polynucleotide
  source 1..51: mol_type = other DNA
cttcagtccgtgcccccgggagcctbtgaccacctgccccagctgcagacc

SEQ ID NO: 1465 - DNA, 51 bp, synthetic construct
  misc_feature 1..51: note = Synthetic polynucleotide
  source 1..51: mol_type = other DNA
gccctgccggcccgcacccgccaccytctgctggccaacaacagccttcag

SEQ ID NO: 1466 - DNA, 51 bp, synthetic construct
  misc_feature 1..51: note = Synthetic polynucleotide
  source 1..51: mol_type = other DNA
ggccaccaaggactgccccagcccaygtacctgccgcgccctggaaaccat

SEQ ID NO: 1467 - DNA, 51 bp, synthetic construct
  misc_feature 1..51: note = Synthetic polynucleotide
  source 1..51: mol_type = other DNA
tgtcccatgcctgcctggggagcccygttcctgctctgggccacagcagag

SEQ ID NO: 1468 - DNA, 51 bp, synthetic construct
  misc_feature 1..51: note = Synthetic polynucleotide
  source 1..51: mol_type = other DNA
cgatttttaaacagatgcagcctcabttccaccttttgttgagaaaagcca

SEQ ID NO: 1469 - DNA, 51 bp, synthetic construct
  misc_feature 1..51: note = Synthetic polynucleotide
  source 1..51: mol_type = other DNA
caacccactgtataaagaggccacgyctaccttcaccaatatcacgtaccg

SEQ ID NO: 1470 - DNA, 51 bp, synthetic construct
  misc_feature 1..51: note = Synthetic polynucleotide
  source 1..51: mol_type = other DNA
gctcctgtcttacaggccctgcctcygggctcacctcgctgtgacctgaag

SEQ ID NO: 1471 - DNA, 51 bp, synthetic construct
  misc_feature 1..51: note = Synthetic polynucleotide
  source 1..51: mol_type = other DNA
aggggggtgtgtggcccacccacatycctggccctggcaagtcagtcttag

SEQ ID NO: 1472 - DNA, 51 bp, synthetic construct
  misc_feature 1..51: note = Synthetic polynucleotide
  source 1..51: mol_type = other DNA
caaactgaaagcaatattatccaaayggctggaggaagctgagcaagtagg

SEQ ID NO: 1473 - DNA, 51 bp, synthetic construct
  misc_feature 1..51: note = Synthetic polynucleotide
  source 1..51: mol_type = other DNA
accaaccctgtcagatatgaccatghatgagatgaatttctctctccttgt

SEQ ID NO: 1474 - DNA, 51 bp, synthetic construct
  misc_feature 1..51: note = Synthetic polynucleotide
  source 1..51: mol_type = other DNA
ctccctcctaggacacggcgagccaygggcggggcagtgcctttcaaagct

SEQ ID NO: 1475 - DNA, 51 bp, synthetic construct
  misc_feature 1..51: note = Synthetic polynucleotide
  source 1..51: mol_type = other DNA
ctgggaaagcagctggctaagaaaabagagcctgagcttgatggcagtgct

SEQ ID NO: 1476 - DNA, 51 bp, synthetic construct
  misc_feature 1..51: note = Synthetic polynucleotide
  source 1..51: mol_type = other DNA
tttgggtgtgagacacacgccatgcygccctatgaccagtacctgcaccgc

SEQ ID NO: 1477 - DNA, 51 bp, synthetic construct
  misc_feature 1..51: note = Synthetic polynucleotide
  source 1..51: mol_type = other DNA
acgagagaatgtctccatggtggacyatggtgagacctccaggacccaggg

SEQ ID NO: 1478 - DNA, 51 bp, synthetic construct
  misc_feature 1..51: note = Synthetic polynucleotide
  source 1..51: mol_type = other DNA
gatcctgcggaagaaccccaaaggcytcttcttgctggtggaaggtaggga

SEQ ID NO: 1479 - DNA, 51 bp, synthetic construct
  misc_feature 1..51: note = Synthetic polynucleotide
  source 1..51: mol_type = other DNA
ggagttcaatgatgttcacttttctyacccttctcgagctaacgtcaaggt

SEQ ID NO: 1480 - DNA, 51 bp, synthetic construct
  misc_feature 1..51: note = Synthetic polynucleotide
  source 1..51: mol_type = other DNA
caagatttacggcgacgattcttccytcaccatctgatcgcagaaatccac

SEQ ID NO: 1481 - DNA, 51 bp, synthetic construct
  misc_feature 1..51: note = Synthetic polynucleotide
  source 1..51: mol_type = other DNA
agagctgtgtctgaacatcagctccyccatgacaaggggaagtccatccaa

SEQ ID NO: 1482 - DNA, 51 bp, synthetic construct
  misc_feature 1..51: note = Synthetic polynucleotide
  source 1..51: mol_type = other DNA
agttatgattgtcatgttggcaattygttttcttacaaaatcggatgggaa

SEQ ID NO: 1483 - DNA, 51 bp, synthetic construct
  misc_feature 1..51: note = Synthetic polynucleotide
  source 1..51: mol_type = other DNA
gttggcaatttgttttcttacaaaaycggatgggaaatctgttaagtaagt

SEQ ID NO: 1484 - DNA, 51 bp, synthetic construct
  misc_feature 1..51: note = Synthetic polynucleotide
  source 1..51: mol_type = other DNA
acctctggacgcagaacttcagccaygaaggtaacaggcatctttcttctc

SEQ ID NO: 1485 - DNA, 51 bp, synthetic construct
  misc_feature 1..51: note = Synthetic polynucleotide
  source 1..51: mol_type = other DNA
atctttcttctcagtgccttggcccbgttgagtctatctggtaagtgttgc

SEQ ID NO: 1486 - DNA, 51 bp, synthetic construct
  misc_feature 1..51: note = Synthetic polynucleotide
  source 1..51: mol_type = other DNA
ggagtgttcgtgaacgggaggccgcygcccaacgccatccggcttcgcatc

SEQ ID NO: 1487 - DNA, 51 bp, synthetic construct
  misc_feature 1..51: note = Synthetic polynucleotide
  source 1..51: mol_type = other DNA
ttaatcaaaggaacaatatgaattahactgtgagatgggctccacattcca

SEQ ID NO: 1488 - DNA, 51 bp, synthetic construct
  misc_feature 1..51: note = Synthetic polynucleotide
  source 1..51: mol_type = other DNA
cagcgccgagagactgtggtacgtgyctgtgaacggcaagggccggccccg

SEQ ID NO: 1489 - DNA, 51 bp, synthetic construct
  misc_feature 1..51: note = Synthetic polynucleotide
  source 1..51: mol_type = other DNA
gatgccacgatgggcctaatctggcygctactgctcagcctgctggagccc

SEQ ID NO: 1490 - DNA, 51 bp, synthetic construct
  misc_feature 1..51: note = Synthetic polynucleotide
  misc_difference 26: note = n is a, c, g, t or u
  source 1..51: mol_type = other DNA
cccatgtatgaagtacagtggaaggntgttgaggagataaatggaaacaat

SEQ ID NO: 1491 - DNA, 51 bp, synthetic construct
  misc_feature 1..51: note = Synthetic polynucleotide
  source 1..51: mol_type = other DNA
catctacgagttcatcatgaagaacytcccttactaccgcgagaacaagca

SEQ ID NO: 1492 - DNA, 51 bp, synthetic construct
  misc_feature 1..51: note = Synthetic polynucleotide
  source 1..51: mol_type = other DNA
caatttctgaccgagggaatcatcaygaaagattttagtcatcccaatgtc

SEQ ID NO: 1493 - DNA, 51 bp, synthetic construct
  misc_feature 1..51: note = Synthetic polynucleotide
  misc_difference 26: note = n is a, c, g, t or u
  source 1..51: mol_type = other DNA
cttccctgaggaggagaagtgcttcngcgagcccgaagacatccagggtga

SEQ ID NO: 1494 - DNA, 51 bp, synthetic construct
  misc_feature 1..51: note = Synthetic polynucleotide
  misc_difference 26: note = n is a, c, g, t or u
  source 1..51: mol_type = other DNA
cacagatccactgtgcgacgagctgngccgcacggtgatcgcagccgctgt

SEQ ID NO: 1495 - DNA, 51 bp, synthetic construct
  misc_feature 1..51: note = Synthetic polynucleotide
  source 1..51: mol_type = other DNA
tagggtcggattccagttaaatggayggcaattgaatccctttttgatcat

SEQ ID NO: 1496 - DNA, 51 bp, synthetic construct
  misc_feature 1..51: note = Synthetic polynucleotide
  misc_difference 26: note = n is a, c, g, t or u
  source 1..51: mol_type = other DNA
caactgcttccctgaggaggagaagngcttctgcgagcccgaagacatcca

SEQ ID NO: 1497 - DNA, 51 bp, synthetic construct
  misc_feature 1..51: note = Synthetic polynucleotide
  misc_difference 26: note = n is a, c, g, t or u
  source 1..51: mol_type = other DNA
ggggattaaagctggctatggcaccngcaactgcttccctgaggaggagaa

SEQ ID NO: 1498 - DNA, 51 bp, synthetic construct
  misc_feature 1..51: note = Synthetic polynucleotide
  source 1..51: mol_type = other DNA
atgcatgacttctttgtgggacttaygggcaagaggagcgtccagccaggt

SEQ ID NO: 1499 - DNA, 51 bp, synthetic construct
  misc_feature 1..51: note = Synthetic polynucleotide
  source 1..51: mol_type = other DNA
atccgcacgcaggagaaggcgcagcyccaggacctcaatgaccgcttcgcc

SEQ ID NO: 1500 - DNA, 51 bp, synthetic construct
  misc_feature 1..51: note = Synthetic polynucleotide
  source 1..51: mol_type = other DNA
tgcgggcgcgacgaggcgctgcggcygaagcagaggcgccgcacgctgaag

SEQ ID NO: 1501 - DNA, 51 bp, synthetic construct
  misc_feature 1..51: note = Synthetic polynucleotide
  source 1..51: mol_type = other DNA
agccgggggcgccaactccaacgtgytctccatgttcgaacagacccaaat

SEQ ID NO: 1502 - DNA, 51 bp, synthetic construct
  misc_feature 1..51: note = Synthetic polynucleotide
  source 1..51: mol_type = other DNA
ttcacttcagaggagaaaaactccaygtataagctgacaggcgccatcatg

SEQ ID NO: 1503 - DNA, 51 bp, synthetic construct
  misc_feature 1..51: note = Synthetic polynucleotide
  source 1..51: mol_type = other DNA
gcttcctcagcccatgggcatcatgyccatcctggaagaggagtgcatgtt

SEQ ID NO: 1504 - DNA, 51 bp, synthetic construct
  misc_feature 1..51: note = Synthetic polynucleotide
  source 1..51: mol_type = other DNA
aacatggaacagaccattaaggaccygcagcaccggctggacgaagccgag

SEQ ID NO: 1505 - DNA, 51 bp, synthetic construct
  misc_feature 1..51: note = Synthetic polynucleotide
  source 1..51: mol_type = other DNA
gaggtggaacataagaagaagaagcyggaggcgcaggtgcaggagctgcag

SEQ ID NO: 1506 - DNA, 51 bp, synthetic construct
  misc_feature 1..51: note = Synthetic polynucleotide
  source 1..51: mol_type = other DNA
tgtgacgtcaaaaaccctccagacayagtgggcaagacctctcaggtcacg

SEQ ID NO: 1507 - DNA, 51 bp, synthetic construct
  misc_feature 1..51: note = Synthetic polynucleotide
  source 1..51: mol_type = other DNA
cgctggaaggatggctccattgtcayacacaacctagactacagtgacaat

SEQ ID NO: 1508 - DNA, 51 bp, synthetic construct
  misc_feature 1..51: note = Synthetic polynucleotide
  source 1..51: mol_type = other DNA
agtccaagtgtggctcaaaggataayatcaaacacgtcccgggaggcggca

SEQ ID NO: 1509 - DNA, 51 bp, synthetic construct
  misc_feature 1..51: note = Synthetic polynucleotide
  source 1..51: mol_type = other DNA
gaacaagggaaccatcttaaaagcayccgtggactatatccgaaagttgca

SEQ ID NO: 1510 - DNA, 51 bp, synthetic construct
  misc_feature 1..51: note = Synthetic polynucleotide
  source 1..51: mol_type = other DNA
aatgcaggctcgagctcatggacttycccttattccatccacgggtctctg

SEQ ID NO: 1511 - DNA, 51 bp, synthetic construct
  misc_feature 1..51: note = Synthetic polynucleotide
  source 1..51: mol_type = other DNA
accaagaatgagtccggcatcattcytttgggaagtggagggacaccagca

SEQ ID NO: 1512 - DNA, 51 bp, synthetic construct
  misc_feature 1..51: note = Synthetic polynucleotide
  source 1..51: mol_type = other DNA
acaaccctctgtacctggaggatcaygtcagccatgccaatgcaatgacaa

SEQ ID NO: 1513 - DNA, 51 bp, synthetic construct
  misc_feature 1..51: note = Synthetic polynucleotide
  source 1..51: mol_type = other DNA
cccgatgccaaccacaagccagagayggccattgccctcacccccttccag

SEQ ID NO: 1514 - DNA, 51 bp, synthetic construct
  misc_feature 1..51: note = Synthetic polynucleotide
  source 1..51: mol_type = other DNA
ggagacagaagcactgattatgggayatttcagatcaatagccgctactgg

SEQ ID NO: 1515 - DNA, 51 bp, synthetic construct
  misc_feature 1..51: note = Synthetic polynucleotide
  source 1..51: mol_type = other DNA
gatatttcagatcaatagccgctachggtgtaatgatggcaaaaccccagg

SEQ ID NO: 1516 - DNA, 51 bp, synthetic construct
  misc_feature 1..51: note = Synthetic polynucleotide
  source 1..51: mol_type = other DNA
caatgtggtggccttcttcataattygtgcttgctacattaaaatttattt

SEQ ID NO: 1517 - DNA, 51 bp, synthetic construct
  misc_feature 1..51: note = Synthetic polynucleotide
  source 1..51: mol_type = other DNA
aaacttacagtgcctcgttttctcaygtgcaatctctcctttgcagacttt

SEQ ID NO: 1518 - DNA, 51 bp, synthetic construct
  misc_feature 1..51: note = Synthetic polynucleotide
  source 1..51: mol_type = other DNA
tcctgtccctaatcacaggagcatcygtaacacaggcatcagaaagtttcc

SEQ ID NO: 1519 - DNA, 51 bp, synthetic construct
  misc_feature 1..51: note = Synthetic polynucleotide
  source 1..51: mol_type = other DNA
gacttccttagggtcctgatttggcygattaatattctagccatcatggga

SEQ ID NO: 1520 - DNA, 51 bp, synthetic construct
  misc_feature 1..51: note = Synthetic polynucleotide
  source 1..51: mol_type = other DNA
tcttctctaattgctatgttgccccytgtcggtgtcagcaattacatgaag

SEQ ID NO: 1521 - DNA, 51 bp, synthetic construct
  misc_feature 1..51: note = Synthetic polynucleotide
  source 1..51: mol_type = other DNA
tgcgggaacagcctgcgtacggctcycatcaactccactggggaagtaagt

SEQ ID NO: 1522 - DNA, 51 bp, synthetic construct
  misc_feature 1..51: note = Synthetic polynucleotide
  source 1..51: mol_type = other DNA
gagatccacgcctaccgcaagctctyggagggcgaggaggagaggtgggct

SEQ ID NO: 1523 - DNA, 51 bp, synthetic construct
  misc_feature 1..51: note = Synthetic polynucleotide
  source 1..51: mol_type = other DNA
caaacacaacacacgtggcctcaacygcgagcagtgtcaggatttctatcg

SEQ ID NO: 1524 - DNA, 51 bp, synthetic construct
  misc_feature 1..51: note = Synthetic polynucleotide
  source 1..51: mol_type = other DNA
aaatccataaggttaagttggacctrcagagggaagggaaagagaagcgct

SEQ ID NO: 1525 - DNA, 51 bp, synthetic construct
  misc_feature 1..51: note = Synthetic polynucleotide
  source 1..51: mol_type = other DNA
ctgaatgaccgcctggcttcctactyggacaaagttcgggctctggaagaa

SEQ ID NO: 1526 - DNA, 51 bp, synthetic construct
  misc_feature 1..51: note = Synthetic polynucleotide
  source 1..51: mol_type = other DNA
ctctctggaaatgaaaaagtaaccabgcagaatctgaatgaccgcctggct

SEQ ID NO: 1527 - DNA, 51 bp, synthetic construct
  misc_feature 1..51: note = Synthetic polynucleotide
  source 1..51: mol_type = other DNA
ctggctggaggtgagaaggccaccahgcagaacctcaatgaccgcctggcc

SEQ ID NO: 1528 - DNA, 51 bp, synthetic construct
  misc_feature 1..51: note = Synthetic polynucleotide
  source 1..51: mol_type = other DNA
accatgcagaacctcaatgaccgcchggcctcctacctggacaaggtgcgt

SEQ ID NO: 1529 - DNA, 51 bp, synthetic construct
  misc_feature 1..51: note = Synthetic polynucleotide
  source 1..51: mol_type = other DNA
ctcaatgaccgcctggcctcctaccyggacaaggtgcgtgccctggaggag

SEQ ID NO: 1530 - DNA, 51 bp, synthetic construct
  misc_feature 1..51: note = Synthetic polynucleotide
  source 1..51: mol_type = other DNA
ctcaatgaccgcctggcctcctaccyggacaaggtgcgtgctctggaggag

SEQ ID NO: 1531 - DNA, 51 bp, synthetic construct
  misc_feature 1..51: note = Synthetic polynucleotide
  source 1..51: mol_type = other DNA
ctggtgggcagtgagaaggtgaccahgcagaacctcaatgaccgcctggcc

SEQ ID NO: 1532 - DNA, 51 bp, synthetic construct
  misc_feature 1..51: note = Synthetic polynucleotide
  source 1..51: mol_type = other DNA
atgattggcagcgtggaggagcagcyggcccagctccgctgcgagatggag

SEQ ID NO: 1533 - DNA, 51 bp, synthetic construct
  misc_feature 1..51: note = Synthetic polynucleotide
  source 1..51: mol_type = other DNA
ctggtgggcagtgagaaggtgaccaygcagaacctcaatgaccgcctggcc

SEQ ID NO: 1534 - DNA, 51 bp, synthetic construct
  misc_feature 1..51: note = Synthetic polynucleotide
  source 1..51: mol_type = other DNA
gcggctggagcaggagatcgccaccyaccgccgcctgctggagggcgagga

SEQ ID NO: 1535 - DNA, 51 bp, synthetic construct
  misc_feature 1..51: note = Synthetic polynucleotide
  source 1..51: mol_type = other DNA
ctcaacgaccgcctggcttcctaccyggagaaggtgcgcgccctggaggag

SEQ ID NO: 1536 - DNA, 51 bp, synthetic construct
  misc_feature 1..51: note = Synthetic polynucleotide
  source 1..51: mol_type = other DNA
ctttcgcggtggcctgggcggcggchatggtggggccagcggcatgggagg

SEQ ID NO: 1537 - DNA, 51 bp, synthetic construct
  misc_feature 1..51: note = Synthetic polynucleotide
  source 1..51: mol_type = other DNA
gagctcatgaacaccaagctggcccyggacgtggagatcgccacttaccgc

SEQ ID NO: 1538 - DNA, 51 bp, synthetic construct
  misc_feature 1..51: note = Synthetic polynucleotide
  source 1..51: mol_type = other DNA
tctgacacctcagtggtcctctccahggacaacaaccgcaacctggacctg

SEQ ID NO: 1539 - DNA, 51 bp, synthetic construct
  misc_feature 1..51: note = Synthetic polynucleotide
  source 1..51: mol_type = other DNA
gccaccatgtctcgccagtcaagtgygtccttccggagcgggggcagtcgt

SEQ ID NO: 1540 - DNA, 51 bp, synthetic construct
  misc_feature 1..51: note = Synthetic polynucleotide
  source 1..51: mol_type = other DNA
caagaccctcaacaataagtttgccyccttcatcgacaaggtgagctacga

SEQ ID NO: 1541 - DNA, 51 bp, synthetic construct
  misc_feature 1..51: note = Synthetic polynucleotide
  source 1..51: mol_type = other DNA
tgcgtggcctgccgcaacttctaccyggacggcaggtgtgtggagacctgc

SEQ ID NO: 1542 - DNA, 51 bp, synthetic construct
  misc_feature 1..51: note = Synthetic polynucleotide
  source 1..51: mol_type = other DNA
ttgcatgagctggagaattgctctgycatcgaaggacacttgcagatactc

SEQ ID NO: 1543 - DNA, 51 bp, synthetic construct
  misc_feature 1..51: note = Synthetic polynucleotide
  source 1..51: mol_type = other DNA
catcactcggatgcgcatgagacccyggctagagatgcagattaattccaa

SEQ ID NO: 1544 - DNA, 51 bp, synthetic construct
  misc_feature 1..51: note = Synthetic polynucleotide
  source 1..51: mol_type = other DNA
aacctcaagaagatggggcagaaccygggtacggcagggccagagtggagg

SEQ ID NO: 1545 - DNA, 51 bp, synthetic construct
  misc_feature 1..51: note = Synthetic polynucleotide
  source 1..51: mol_type = other DNA
ccgaggacgctgctccatgggccagygtgtgtgtgagcctggttggacagg

SEQ ID NO: 1546 - DNA, 51 bp, synthetic construct
  misc_feature 1..51: note = Synthetic polynucleotide
  source 1..51: mol_type = other DNA
ctgcaagaaggccccagtgaagagcygcacggagtgtgtccgtgtggataa

SEQ ID NO: 1547 - DNA, 51 bp, synthetic construct
  misc_feature 1..51: note = Synthetic polynucleotide
  source 1..51: mol_type = other DNA
atctcactctcaggagaccattgcaycattggccgcacactggtggtaagt

SEQ ID NO: 1548 - DNA, 51 bp, synthetic construct
  misc_feature 1..51: note = Synthetic polynucleotide
  source 1..51: mol_type = other DNA
aagacaggaaacgctggaagtcgttyggcttgtggtgtaattgggatcgcc

SEQ ID NO: 1549 - DNA, 51 bp, synthetic construct
  misc_feature 1..51: note = Synthetic polynucleotide
  source 1..51: mol_type = other DNA
cgtttggcttgtggtgtaattgggaycgcccaataaacattcccttggatg

SEQ ID NO: 1550 - DNA, 51 bp, synthetic construct
  misc_feature 1..51: note = Synthetic polynucleotide
  source 1..51: mol_type = other DNA
accagactttctttttgtaggtttcyctacagtgagttaatgaaatacaac

SEQ ID NO: 1551 - DNA, 51 bp, synthetic construct
  misc_feature 1..51: note = Synthetic polynucleotide
  source 1..51: mol_type = other DNA
tccaaaaagaacatttttcttctatytaagaagctctgctccttccgttac

SEQ ID NO: 1552 - DNA, 51 bp, synthetic construct
  misc_feature 1..51: note = Synthetic polynucleotide
  source 1..51: mol_type = other DNA
ccatatttcaaattccagattggtgrtgttgacatctgggtcctcaaaagc

SEQ ID NO: 1553 - DNA, 51 bp, synthetic construct
  misc_feature 1..51: note = Synthetic polynucleotide
  source 1..51: mol_type = other DNA
actgcaacagagaatggtgacttctyggccctggatcttggaggaaccaat

SEQ ID NO: 1554 - DNA, 51 bp, synthetic construct
  misc_feature 1..51: note = Synthetic polynucleotide
  source 1..51: mol_type = other DNA
cttccccacactatctcaatgcaaayatctgtctgaaacggtccctggcta

SEQ ID NO: 1555 - DNA, 51 bp, synthetic construct
  misc_feature 1..51: note = Synthetic polynucleotide
  source 1..51: mol_type = other DNA
gttgtctacccatggacccagaggtyctttgacagctttggcaacctgtcc

SEQ ID NO: 1556 - DNA, 51 bp, synthetic construct
  misc_feature 1..51: note = Synthetic polynucleotide
  source 1..51: mol_type = other DNA
tagcagtatcctcttgggggcccctyccccacactatctcaatgcaaatat

SEQ ID NO: 1557 - DNA, 51 bp, synthetic construct
  misc_feature 1..51: note = Synthetic polynucleotide
  source 1..51: mol_type = other DNA
tctcacaaactaatgaaaccctgctyatcttaaaccaacctgctcactgga

SEQ ID NO: 1558 - DNA, 51 bp, synthetic construct
  misc_feature 1..51: note = Synthetic polynucleotide
  source 1..51: mol_type = other DNA
cacctggacaacctcaagggcacctytgccacactgagtgagctgcactgt

SEQ ID NO: 1559 - DNA, 51 bp, synthetic construct
  misc_feature 1..51: note = Synthetic polynucleotide
  source 1..51: mol_type = other DNA
gtctacccttggacccagaggttctbtgagtcctttggggatctgtccact

SEQ ID NO: 1560 - DNA, 51 bp, synthetic construct
  misc_feature 1..51: note = Synthetic polynucleotide
  source 1..51: mol_type = other DNA
acagctcctgggcaacgtgctggtcygtgtgctggcccatcactttggcaa

SEQ ID NO: 1561 - DNA, 51 bp, synthetic construct
  misc_feature 1..51: note = Synthetic polynucleotide
  source 1..51: mol_type = other DNA
ggtctacccttggacccagaggttcbttgagtcctttggggatctgtccac

SEQ ID NO: 1562 - DNA, 51 bp, synthetic construct
  misc_feature 1..51: note = Synthetic polynucleotide
  source 1..51: mol_type = other DNA
ctcccacagctcctgggcaacgtgcyggtctgtgtgctggcccatcacttt

SEQ ID NO: 1563 - DNA, 51 bp, synthetic construct
  misc_feature 1..51: note = Synthetic polynucleotide
  source 1..51: mol_type = other DNA
ggtggtgaggccctgggcaggttgghatcaaggttacaagacaggtttaag

SEQ ID NO: 1564 - DNA, 51 bp, synthetic construct
  misc_feature 1..51: note = Synthetic polynucleotide
  source 1..51: mol_type = other DNA
ctgggcaacgtgctggtctgtgtgcyggcccatcactttggcaaagaattc

SEQ ID NO: 1565 - DNA, 51 bp, synthetic construct
  misc_feature 1..51: note = Synthetic polynucleotide
  misc_difference 26: note = n is a, c, g, t or u
  source 1..51: mol_type = other DNA
caccgtgctgacctccaaataccgtnaagctggagcctcggtagccgttcc

SEQ ID NO: 1566 - DNA, 51 bp, synthetic construct
  misc_feature 1..51: note = Synthetic polynucleotide
  source 1..51: mol_type = other DNA
ccacagactcagagagaacccaccayggtgctgtctcctgccgacaagacc

SEQ ID NO: 1567 - DNA, 51 bp, synthetic construct
  misc_feature 1..51: note = Synthetic polynucleotide
  source 1..51: mol_type = other DNA
gctggcgagtatggtgcggaggcccyggagaggtgaggctccctcccctgc

SEQ ID NO: 1568 - DNA, 51 bp, synthetic construct
  misc_feature 1..51: note = Synthetic polynucleotide
  source 1..51: mol_type = other DNA
caagaagtcactatcaaccagagccytcttcagcccctcaatgtggagatt

SEQ ID NO: 1569 - DNA, 51 bp, synthetic construct
  misc_feature 1..51: note = Synthetic polynucleotide
  source 1..51: mol_type = other DNA
accaagctggccctggatctggagaytgccacctacaggaccctcctggag

SEQ ID NO: 1570 - DNA, 51 bp, synthetic construct
  misc_feature 1..51: note = Synthetic polynucleotide
  source 1..51: mol_type = other DNA
gagctgatgaacaccaagctggcccyggatctggagattgccacctacagg

SEQ ID NO: 1571 - DNA, 51 bp, synthetic construct
  misc_feature 1..51: note = Synthetic polynucleotide
  source 1..51: mol_type = other DNA
aaagtgcaggacatcaaaaacaaccygaaagaggcgattgaagtacgtgct

SEQ ID NO: 1572 - DNA, 51 bp, synthetic construct
  misc_feature 1..51: note = Synthetic polynucleotide
  source 1..51: mol_type = other DNA
aggaaacacaacagaaatccgtgagyggatgccttctccccaggcggggat

SEQ ID NO: 1573 - DNA, 51 bp, synthetic construct
  misc_feature 1..51: note = Synthetic polynucleotide
  source 1..51: mol_type = other DNA
tccttggtactttgcaggcagaccaygtggaccctggtgagctgggtggcc

SEQ ID NO: 1574 - DNA, 51 bp, synthetic construct
  misc_feature 1..51: note = Synthetic polynucleotide
  source 1..51: mol_type = other DNA
ggtgattttgcacccagagtttctaycctccaccagtcccttactacccat

SEQ ID NO: 1575 - DNA, 51 bp, synthetic construct
  misc_feature 1..51: note = Synthetic polynucleotide
  source 1..51: mol_type = other DNA
aggtataagaagagatttcataagtytgatgcagaccagaaaggctttatt

SEQ ID NO: 1576 - DNA, 51 bp, synthetic construct
  misc_feature 1..51: note = Synthetic polynucleotide
  source 1..51: mol_type = other DNA
atcttcatgtcagtgggacttgtgcbgctggtaagtttggtgcctgcactg

SEQ ID NO: 1577 - DNA, 51 bp, synthetic construct
  misc_feature 1..51: note = Synthetic polynucleotide
  source 1..51: mol_type = other DNA
gtgttcttttccctaatagggtgcayctgagaaagacatcgtgcactctgg

SEQ ID NO: 1578 - DNA, 51 bp, synthetic construct
  misc_feature 1..51: note = Synthetic polynucleotide
  source 1..51: mol_type = other DNA
cttcgactacatctctgagtgcatcyccgacttcctggacaagcatcagat

SEQ ID NO: 1579 - DNA, 51 bp, synthetic construct
  misc_feature 1..51: note = Synthetic polynucleotide
  source 1..51: mol_type = other DNA
ctcaacatgttaggagggcggcaagygattgcagcagtgaaatgggcaaag

SEQ ID NO: 1580 - DNA, 51 bp, synthetic construct
  misc_feature 1..51: note = Synthetic polynucleotide
  source 1..51: mol_type = other DNA
tcaaatggaaatatcaaaaaacttcygtttcatcaaaagtgactgccttaa

SEQ ID NO: 1581 - DNA, 51 bp, synthetic construct
  misc_feature 1..51: note = Synthetic polynucleotide
  source 1..51: mol_type = other DNA
ggttgaaaatctccttaactattgcytccaaacatttttggataagaccat

SEQ ID NO: 1582 - DNA, 51 bp, synthetic construct
  misc_feature 1..51: note = Synthetic polynucleotide
  source 1..51: mol_type = other DNA
cgccacttgcaggagtaccaggaccygctcaatgtcaagctggccctggac

SEQ ID NO: 1583 - DNA, 51 bp, synthetic construct
  misc_feature 1..51: note = Synthetic polynucleotide
  source 1..51: mol_type = other DNA
cggctcttccgcgagcgctatcggcygcaccccaagttcgtggcggccgtg

SEQ ID NO: 1584 - DNA, 51 bp, synthetic construct
  misc_feature 1..51: note = Synthetic polynucleotide
  source 1..51: mol_type = other DNA
tttctccctgctttcctaggtatgtyctcctacgtcatgctggccagcagc

SEQ ID NO: 1585 - DNA, 51 bp, synthetic construct
  misc_feature 1..51: note = Synthetic polynucleotide
  source 1..51: mol_type = other DNA
caagataacataaacatccacacaaytgaaagaaattctttcgtggggctg

SEQ ID NO: 1586 - DNA, 51 bp, synthetic construct
  misc_feature 1..51: note = Synthetic polynucleotide
  source 1..51: mol_type = other DNA
ctcaatgtcctggcctttgtggtcayctgtggctgctatatccacatctac

SEQ ID NO: 1587 - DNA, 51 bp, synthetic construct
  misc_feature 1..51: note = Synthetic polynucleotide
  source 1..51: mol_type = other DNA
agagacctggctgctcggaacattcygctgtcggaaagcgacgtggtgaag

SEQ ID NO: 1588 - DNA, 51 bp, synthetic construct
  misc_feature 1..51: note = Synthetic polynucleotide
  source 1..51: mol_type = other DNA
ctgaagtggatggcccctgaaagcaycttcgacaaggtgtacaccacgcag

SEQ ID NO: 1589 - DNA, 51 bp, synthetic construct
  misc_feature 1..51: note = Synthetic polynucleotide
  source 1..51: mol_type = other DNA
cacatcgaggtgaatgggagcaagaytggcccagacaacctgccttatgtc

SEQ ID NO: 1590 - DNA, 51 bp, synthetic construct
  misc_feature 1..51: note = Synthetic polynucleotide
  source 1..51: mol_type = other DNA
cctgtacctggagatcatcatctatygcacaggggccttcctcatctcctg

SEQ ID NO: 1591 - DNA, 51 bp, synthetic construct
  misc_feature 1..51: note = Synthetic polynucleotide
  source 1..51: mol_type = other DNA
tcctggaatctgtggtccagggacaygttacaacaccgttggcaactacac

SEQ ID NO: 1592 - DNA, 51 bp, synthetic construct
  misc_feature 1..51: note = Synthetic polynucleotide
  source 1..51: mol_type = other DNA
ctgtttttgtgcagacattgacgaaygccgcatatctcctgacctctgtgg

SEQ ID NO: 1593 - DNA, 51 bp, synthetic construct
  misc_feature 1..51: note = Synthetic polynucleotide
  source 1..51: mol_type = other DNA
tatccctggagagtacaggtgcttgygttatgatggattcatggcatctga

SEQ ID NO: 1594 - DNA, 51 bp, synthetic construct
  misc_feature 1..51: note = Synthetic polynucleotide
  source 1..51: mol_type = other DNA
atccagatctaacttggggtggcttygtcttcttcttttgccaattccact

SEQ ID NO: 1595 - DNA, 51 bp, synthetic construct
  misc_feature 1..51: note = Synthetic polynucleotide
  source 1..51: mol_type = other DNA
catgaatctccaactttaaatcctghaggtattgaaataggtatcagcttt

SEQ ID NO: 1596 - DNA, 51 bp, synthetic construct
  misc_feature 1..51: note = Synthetic polynucleotide
  source 1..51: mol_type = other DNA
atcctggacacttgcctgtatgtgayggacagagcacaaatggacctctct

SEQ ID NO: 1597 - DNA, 51 bp, synthetic construct
  misc_feature 1..51: note = Synthetic polynucleotide
  source 1..51: mol_type = other DNA
gctgaatgacacattggactatgaaygccatgatggttatgaaagcaatac

SEQ ID NO: 1598 - DNA, 51 bp, synthetic construct
  misc_feature 1..51: note = Synthetic polynucleotide
  source 1..51: mol_type = other DNA
aagttaataaatttggcttatttgcytggaagtgattataccgaaggaata

SEQ ID NO: 1599 - DNA, 51 bp, synthetic construct
  misc_feature 1..51: note = Synthetic polynucleotide
  source 1..51: mol_type = other DNA
ccagtttacaaatatgcccaagactycttggtggctattgcagagccagtg

SEQ ID NO: 1600 - DNA, 51 bp, synthetic construct
  misc_feature 1..51: note = Synthetic polynucleotide
  source 1..51: mol_type = other DNA
ctgggtcgctgcgtgggccacgcccyggaggtggaggaggcgctgctctgc

SEQ ID NO: 1601 - DNA, 51 bp, synthetic construct
  misc_feature 1..51: note = Synthetic polynucleotide
  source 1..51: mol_type = other DNA
cgcacaggcccccacgtggacagcayggaccgcggcacgctccctctggct

SEQ ID NO: 1602 - DNA, 51 bp, synthetic construct
  misc_feature 1..51: note = Synthetic polynucleotide
  source 1..51: mol_type = other DNA
aaaccaatcagaaaacacaggaacabgcactgcaaggtttctttgttggat

SEQ ID NO: 1603 - DNA, 51 bp, synthetic construct
  misc_feature 1..51: note = Synthetic polynucleotide
  source 1..51: mol_type = other DNA
caacttcgtcatgtcggccgcgcacygcgtggcgaatgtgtgagtagccgg

SEQ ID NO: 1604 - DNA, 51 bp, synthetic construct
  misc_feature 1..51: note = Synthetic polynucleotide
  source 1..51: mol_type = other DNA
accatggcaaccttcaccatgacgcyggcacgggtctgcctctgccctatg

SEQ ID NO: 1605 - DNA, 51 bp, synthetic construct
  misc_feature 1..51: note = Synthetic polynucleotide
  source 1..51: mol_type = other DNA
ccacatcacgctgagcacccatgagygtgccggcctttcagaacgggacat

SEQ ID NO: 1606 - DNA, 51 bp, synthetic construct
  misc_feature 1..51: note = Synthetic polynucleotide
  source 1..51: mol_type = other DNA
ccccctctcctgcagaacgattcccygatgaggcagatgcgggaattggag

SEQ ID NO: 1607 - DNA, 51 bp, synthetic construct
  misc_feature 1..51: note = Synthetic polynucleotide
  source 1..51: mol_type = other DNA
ctcaaggatgagatggcccgccatcygcgcgagtaccaggacctgctcaac

SEQ ID NO: 1608 - DNA, 51 bp, synthetic construct
  misc_feature 1..51: note = Synthetic polynucleotide
  source 1..51: mol_type = other DNA
gttctgaagcaccaagtctgagctcrccactcgctccaaaaacagacccac

SEQ ID NO: 1609 - DNA, 51 bp, synthetic construct
  misc_feature 1..51: note = Synthetic polynucleotide
  source 1..51: mol_type = other DNA
cggcgcctggcagaggcagagatgcygctgctgctgcaccacgtaagcagg

SEQ ID NO: 1610 - DNA, 51 bp, synthetic construct
  misc_feature 1..51: note = Synthetic polynucleotide
  source 1..51: mol_type = other DNA
taccccgccgagaggctcacctcctyccggcctgcggcctgtgctgtaagt

SEQ ID NO: 1611 - DNA, 51 bp, synthetic construct
  misc_feature 1..51: note = Synthetic polynucleotide
  source 1..51: mol_type = other DNA
ggcttccaagggcagcagtacattcyggaacgaggcgaatatccaagctgg

SEQ ID NO: 1612 - DNA, 51 bp, synthetic construct
  misc_feature 1..51: note = Synthetic polynucleotide
  source 1..51: mol_type = other DNA
gcaaccccagctctatgagatgttcycttcggtgatgaaacacctgccagg

SEQ ID NO: 1613 - DNA, 51 bp, synthetic construct
  misc_feature 1..51: note = Synthetic polynucleotide
  source 1..51: mol_type = other DNA
actccttgacaaggttcaagcctacycaactgctggagggaaggtgtggct

SEQ ID NO: 1614 - DNA, 51 bp, synthetic construct
  misc_feature 1..51: note = Synthetic polynucleotide
  source 1..51: mol_type = other DNA
gactggagcgccttaggcaaactccytgacaaggttcaagcctactcaact

SEQ ID NO: 1615 - DNA, 51 bp, synthetic construct
  misc_feature 1..51: note = Synthetic polynucleotide
  source 1..51: mol_type = other DNA
ctcctttgcagccacaacgaggatcvtaatgcgaaaaatgaagaggacggt

SEQ ID NO: 1616 - DNA, 51 bp, synthetic construct
  misc_feature 1..51: note = Synthetic polynucleotide
  source 1..51: mol_type = other DNA
cttccccatctcccacatccggctaygggccctgcagctgatcttcgtgtc

SEQ ID NO: 1617 - DNA, 51 bp, synthetic construct
  misc_feature 1..51: note = Synthetic polynucleotide
  source 1..51: mol_type = other DNA
atcttcgtgtccacgccagcgctccyagtggccatgcacgtggcctaccgg

SEQ ID NO: 1618 - DNA, 51 bp, synthetic construct
  misc_feature 1..51: note = Synthetic polynucleotide
  source 1..51: mol_type = other DNA
aagtgtgaagtcattggggagcccaygccaacaatccactggcagaagaac

SEQ ID NO: 1619 - DNA, 51 bp, synthetic construct
  misc_feature 1..51: note = Synthetic polynucleotide
  source 1..51: mol_type = other DNA
gagtgaaaacctctactccatcgccygcgacaagccacagcaggtgcgcaa

SEQ ID NO: 1620 - DNA, 51 bp, synthetic construct
  misc_feature 1..51: note = Synthetic polynucleotide
  source 1..51: mol_type = other DNA
ctggtcatcctggttcccctgtaaghatagccattggtggtgttttcttcc

SEQ ID NO: 1621 - DNA, 51 bp, synthetic construct
  misc_feature 1..51: note = Synthetic polynucleotide
  source 1..51: mol_type = other DNA
gttggacttggccctggaccaatggyatgcttatctgtttatcttagccaa

SEQ ID NO: 1622 - DNA, 51 bp, synthetic construct
  misc_feature 1..51: note = Synthetic polynucleotide
  source 1..51: mol_type = other DNA
ttgcaaggtctgcctggtatcgctgyaagtaaactgtagccatctcgcaca

SEQ ID NO: 1623 - DNA, 51 bp, synthetic construct
  misc_feature 1..51: note = Synthetic polynucleotide
  source 1..51: mol_type = other DNA
ttcgacgttggccctgtctgcttccygtaaactccctccatcccaacctgg

SEQ ID NO: 1624 - DNA, 51 bp, synthetic construct
  misc_feature 1..51: note = Synthetic polynucleotide
  source 1..51: mol_type = other DNA
aaagggactcatgtttgggtaggccygtataagaatggcacccctgtaatg

SEQ ID NO: 1625 - DNA, 51 bp, synthetic construct
  misc_feature 1..51: note = Synthetic polynucleotide
  source 1..51: mol_type = other DNA
tgacccaaggactggaatctttactygtcagataccaggaatatactattt

SEQ ID NO: 1626 - DNA, 51 bp, synthetic construct
  misc_feature 1..51: note = Synthetic polynucleotide
  source 1..51: mol_type = other DNA
cgatctcacagaaaatgaccaggtgyggctccagcttcccaatgccgagtc

SEQ ID NO: 1627 - DNA, 51 bp, synthetic construct
  misc_feature 1..51: note = Synthetic polynucleotide
  source 1..51: mol_type = other DNA
atactcctctgagtatgtccactccyctttctcaggattcctagtggctcc

SEQ ID NO: 1628 - DNA, 51 bp, synthetic construct
  misc_feature 1..51: note = Synthetic polynucleotide
  source 1..51: mol_type = other DNA
tcagataccaggaatatactattttycataccacgtgcatgtgaaagggac

SEQ ID NO: 1629 - DNA, 51 bp, synthetic construct
  misc_feature 1..51: note = Synthetic polynucleotide
  source 1..51: mol_type = other DNA
atgtatctcaacaaccgcctggcccygcctgtcaactccagccctgccgtg

SEQ ID NO: 1630 - DNA, 51 bp, synthetic construct
  misc_feature 1..51: note = Synthetic polynucleotide
  source 1..51: mol_type = other DNA
atcatgccggagcctgagcacgtcabcgtagcctgctgcaatcaggtaagc

SEQ ID NO: 1631 - DNA, 51 bp, synthetic construct
  misc_feature 1..51: note = Synthetic polynucleotide
  source 1..51: mol_type = other DNA
gatctgttcactcagttgagaaagayagtcaaaatggcttccaacgaggac

SEQ ID NO: 1632 - DNA, 51 bp, synthetic construct
  misc_feature 1..51: note = Synthetic polynucleotide
  source 1..51: mol_type = other DNA
tgccaagatgacgataaacccaattyatgagcacgtaggatacacaacctt

SEQ ID NO: 1633 - DNA, 51 bp, synthetic construct
  misc_feature 1..51: note = Synthetic polynucleotide
  source 1..51: mol_type = other DNA
ttctggtgccactaccacagctcctbctctgagtggtaaaggcaatcctga

SEQ ID NO: 1634 - DNA, 51 bp, synthetic construct
  misc_feature 1..51: note = Synthetic polynucleotide
  source 1..51: mol_type = other DNA
acatatattttctttttcagttcttycgggaggaccattgcctcaagggca

SEQ ID NO: 1635 - DNA, 51 bp, synthetic construct
  misc_feature 1..51: note = Synthetic polynucleotide
  source 1..51: mol_type = other DNA
ccttctgggaaggtggtcatcacacygttcaggtattgggatggtggctgg

SEQ ID NO: 1636 - DNA, 51 bp, synthetic construct
  misc_feature 1..51: note = Synthetic polynucleotide
  source 1..51: mol_type = other DNA
ctttggactctggggtttcaacagcyctctggcctgcattgcaatgggagg

SEQ ID NO: 1637 - DNA, 51 bp, synthetic construct
  misc_feature 1..51: note = Synthetic polynucleotide
  source 1..51: mol_type = other DNA
gacacactgccaccagcacaaatacygcgaccccagtgcgtgcgctgttgg

SEQ ID NO: 1638 - DNA, 51 bp, synthetic construct
  misc_feature 1..51: note = Synthetic polynucleotide
  source 1..51: mol_type = other DNA
agtgtgcggctcccccacaggcctgyccatcctcatggagcccatcctgtc

SEQ ID NO: 1639 - DNA, 51 bp, synthetic construct
  misc_feature 1..51: note = Synthetic polynucleotide
  source 1..51: mol_type = other DNA
gggtagtggcagcgacacactgcgaygcctggccctggccactcatgacaa

SEQ ID NO: 1640 - DNA, 51 bp, synthetic construct
  misc_feature 1..51: note = Synthetic polynucleotide
  source 1..51: mol_type = other DNA
tccccacaaatggctattggtgaatyttgactgttctgccatgtggtaagt

SEQ ID NO: 1641 - DNA, 51 bp, synthetic construct
  misc_feature 1..51: note = Synthetic polynucleotide
  source 1..51: mol_type = other DNA
atacaaaaagtatgagaagtctgtgyaagtaatacaactttggaagattta

SEQ ID NO: 1642 - DNA, 51 bp, synthetic construct
  misc_feature 1..51: note = Synthetic polynucleotide
  source 1..51: mol_type = other DNA
acccctggtgggcgccatcctgggcyccctcctctacaactacgtgctgtt

SEQ ID NO: 1643 - DNA, 51 bp, synthetic construct
  misc_feature 1..51: note = Synthetic polynucleotide
  source 1..51: mol_type = other DNA
gctgggcgcggacatggaggacgtgygcggccgcctggtgcagtaccgcgg

SEQ ID NO: 1644 - DNA, 51 bp, synthetic construct
  misc_feature 1..51: note = Synthetic polynucleotide
  source 1..51: mol_type = other DNA
tggcagagcggccagcgctgggaacyggcactgggtcgcttttgggattac

SEQ ID NO: 1645 - DNA, 51 bp, synthetic construct
  misc_feature 1..51: note = Synthetic polynucleotide
  source 1..51: mol_type = other DNA
ctccagcctaaagctccttgacaacygggacagcgtgacctccaccttcag

SEQ ID NO: 1646 - DNA, 51 bp, synthetic construct
  misc_feature 1..51: note = Synthetic polynucleotide
  source 1..51: mol_type = other DNA
ctgaggcaggagatgagcaaggatcyggaggaggtgaaggccaaggtgcag

SEQ ID NO: 1647 - DNA, 51 bp, synthetic construct
  misc_feature 1..51: note = Synthetic polynucleotide
  source 1..51: mol_type = other DNA
tacagcgacgagctgcgccagcgctyggccgcgcgccttgaggctctcaag

SEQ ID NO: 1648 - DNA, 51 bp, synthetic construct
  misc_feature 1..51: note = Synthetic polynucleotide
  source 1..51: mol_type = other DNA
aatatttctcatcattattgtaatayttctgatcatgttggtgatccatca

SEQ ID NO: 1649 - DNA, 51 bp, synthetic construct
  misc_feature 1..51: note = Synthetic polynucleotide
  source 1..51: mol_type = other DNA
tgtcgatctgttcagccctgaaaagyccaaactcccaggtttgtctaggaa

SEQ ID NO: 1650 - DNA, 51 bp, synthetic construct
  misc_feature 1..51: note = Synthetic polynucleotide
  source 1..51: mol_type = other DNA
gtttgacaccatatctgagaaaacayctgatcagatccacttcttctttgc

SEQ ID NO: 1651 - DNA, 51 bp, synthetic construct
  misc_feature 1..51: note = Synthetic polynucleotide
  source 1..51: mol_type = other DNA
aaggtttatcttttgtccttgctgcycattggcttctgggactgcgtgacc

SEQ ID NO: 1652 - DNA, 51 bp, synthetic construct
  misc_feature 1..51: note = Synthetic polynucleotide
  source 1..51: mol_type = other DNA
cagagcggccatcaacaaatgggtgyccaataagaccgaaggccgaatcac

SEQ ID NO: 1653 - DNA, 51 bp, synthetic construct
  misc_feature 1..51: note = Synthetic polynucleotide
  source 1..51: mol_type = other DNA
ttttgctatgaccaagctgggtgccygtaatgacaccctccagcaactgat

SEQ ID NO: 1654 - DNA, 51 bp, synthetic construct
  misc_feature 1..51: note = Synthetic polynucleotide
  source 1..51: mol_type = other DNA
gataagaatgtcatcttctccccacygagcatctccaccgccttggccttc

SEQ ID NO: 1655 - DNA, 51 bp, synthetic construct
  misc_feature 1..51: note = Synthetic polynucleotide
  source 1..51: mol_type = other DNA
aatcagtatgtcaacgtgatgaacahgcttcttttcacactccctggaact

SEQ ID NO: 1656 - DNA, 51 bp, synthetic construct
  misc_feature 1..51: note = Synthetic polynucleotide
  source 1..51: mol_type = other DNA
aatcgagcatgctattccagtgtacygaacatactgtatacctcgtgttag

SEQ ID NO: 1657 - DNA, 51 bp, synthetic construct
  misc_feature 1..51: note = Synthetic polynucleotide
  source 1..51: mol_type = other DNA
cctgaatggactgcgtggctcatctyggctgtgatttcagtatatggtaaa

SEQ ID NO: 1658 - DNA, 51 bp, synthetic construct
  misc_feature 1..51: note = Synthetic polynucleotide
  source 1..51: mol_type = other DNA
ttttatacccggaaggatgggcagcygtacgtatgagttttgttttattat

SEQ ID NO: 1659 - DNA, 51 bp, synthetic construct
  misc_feature 1..51: note = Synthetic polynucleotide
  source 1..51: mol_type = other DNA
cttttctaggtcatccatgcctggcbtattatatcatctctattgttgctg

SEQ ID NO: 1660 - DNA, 51 bp, synthetic construct
  misc_feature 1..51: note = Synthetic polynucleotide
  source 1..51: mol_type = other DNA
tatggcgccaagcatgtgatcatgcyctttgtccctgtgactctctgcatg

SEQ ID NO: 1661 - DNA, 51 bp, synthetic construct
  misc_feature 1..51: note = Synthetic polynucleotide
  source 1..51: mol_type = other DNA
gccttcaaggacaagtacaagcagcycttcttagggggtgtggatcggcat

SEQ ID NO: 1662 - DNA, 51 bp, synthetic construct
  misc_feature 1..51: note = Synthetic polynucleotide
  source 1..51: mol_type = other DNA
tggcaccacaccttctacaacgagcytcgcgtggctcccgaggagcacccc

SEQ ID NO: 1663 - DNA, 51 bp, synthetic construct
  misc_feature 1..51: note = Synthetic polynucleotide
  source 1..51: mol_type = other DNA
aaggagaagctgtgctacgtggcccyggacttcgagaacgagatggcgacg

SEQ ID NO: 1664 - DNA, 51 bp, synthetic construct
  misc_feature 1..51: note = Synthetic polynucleotide
  source 1..51: mol_type = other DNA
ctcaccctcccatccccaggaaccaygaacgctgcctgtgagctgctgggc

SEQ ID NO: 1665 - DNA, 51 bp, synthetic construct
  misc_feature 1..51: note = Synthetic polynucleotide
  source 1..51: mol_type = other DNA
caccacttcccactccaggctgagcyggagattcagaaagacgccctggag

SEQ ID NO: 1666 - DNA, 51 bp, synthetic construct
  misc_feature 1..51: note = Synthetic polynucleotide
  source 1..51: mol_type = other DNA
tacgacgagtcgggcccctccatcgyccaccgcaaatgcttctaaacggac

SEQ ID NO: 1667 - DNA, 51 bp, synthetic construct
  misc_feature 1..51: note = Synthetic polynucleotide
  source 1..51: mol_type = other DNA
ccggctgaagtggaatgctgaagaayttggaaacatcagtgtcctgcgcct

SEQ ID NO: 1668 - DNA, 51 bp, synthetic construct
  misc_feature 1..51: note = Synthetic polynucleotide
  source 1..51: mol_type = other DNA
gccctggccctcacactctccaaccycatctccctggtgagaggccctccg

SEQ ID NO: 1669 - DNA, 51 bp, synthetic construct
  misc_feature 1..51: note = Synthetic polynucleotide
  source 1..51: mol_type = other DNA
ctctgtcttactgtctttgactgtgytccttctggtcatcgtggagctgat

SEQ ID NO: 1670 - DNA, 51 bp, synthetic construct
  misc_feature 1..51: note = Synthetic polynucleotide
  source 1..51: mol_type = other DNA
ggagaaagagttttatggtgtgcttyaagagccctgcagaaaaagtaggta

SEQ ID NO: 1671 - DNA, 51 bp, synthetic construct
  misc_feature 1..51: note = Synthetic polynucleotide
  source 1..51: mol_type = other DNA
agagggagctaggaggctagcatagraaggagaraaggaaaaagactttga

SEQ ID NO: 1672 - DNA, 51 bp, synthetic construct
  misc_feature 1..51: note = Synthetic polynucleotide
  source 1..51: mol_type = other DNA
tataaagactgaggggcaaacagcasgggaaatgaggggcatagggataag

SEQ ID NO: 1673 - DNA, 51 bp, synthetic construct
  misc_feature 1..51: note = Synthetic polynucleotide
  source 1..51: mol_type = other DNA
cgcagacagaagggctgggacggctrtcagcgcctgtgcttccaagrtaag

SEQ ID NO: 1674 - DNA, 51 bp, synthetic construct
  misc_feature 1..51: note = Synthetic polynucleotide
  source 1..51: mol_type = other DNA
atcaggaagccttaccccacgcccaytgcctgcacaagcctcaggcctatg

SEQ ID NO: 1675 - DNA, 51 bp, synthetic construct
  misc_feature 1..51: note = Synthetic polynucleotide
  source 1..51: mol_type = other DNA
caactgcctgggtgcctggatcaagygcggcagtgtgcagcagcatctctt

SEQ ID NO: 1676 - DNA, 51 bp, synthetic construct
  misc_feature 1..51: note = Synthetic polynucleotide
  source 1..51: mol_type = other DNA
tgtccggaggaccacctttatgtccyagagcataatttgcatctactgatt

SEQ ID NO: 1677 - DNA, 51 bp, synthetic construct
  misc_feature 1..51: note = Synthetic polynucleotide
  source 1..51: mol_type = other DNA
ctgtacaaacgctatgggggcttctygcggcgcattcgtcccaagctcaag

SEQ ID NO: 1678 - DNA, 51 bp, synthetic construct
  misc_feature 1..51: note = Synthetic polynucleotide
  source 1..51: mol_type = other DNA
gtgaaggagaagatcacagcttttgyggtggagaggggcttcgggggcatt

SEQ ID NO: 1679 - DNA, 51 bp, synthetic construct
  misc_feature 1..51: note = Synthetic polynucleotide
  source 1..51: mol_type = other DNA
ggagatttcattttctacagtgttcyggttggtaaagcctcagcaacagcc

SEQ ID NO: 1680 - DNA, 51 bp, synthetic construct
  misc_feature 1..51: note = Synthetic polynucleotide
  source 1..51: mol_type = other DNA
ccacacttctgtgcccctgcaggagygctatttagcatcgaggtcacctcc

SEQ ID NO: 1681 - DNA, 51 bp, synthetic construct
  misc_feature 1..51: note = Synthetic polynucleotide
  source 1..51: mol_type = other DNA
gttcggaactactggagaggattctytgcagccacgttcagcgcctttgtg

SEQ ID NO: 1682 - DNA, 51 bp, synthetic construct
  misc_feature 1..51: note = Synthetic polynucleotide
  source 1..51: mol_type = other DNA
caatggagcggtgaatgggaaggggycactcaagggacagcccggagacat

SEQ ID NO: 1683 - DNA, 51 bp, synthetic construct
  misc_feature 1..51: note = Synthetic polynucleotide
  source 1..51: mol_type = other DNA
agagagtgtgtggggtgatgagaaaycttccttcatctgcaacacactcca

SEQ ID NO: 1684 - DNA, 51 bp, synthetic construct
  misc_feature 1..51: note = Synthetic polynucleotide
  source 1..51: mol_type = other DNA
atatccccgtttacacacaaattcarctgattcacctgttctcgaataaag

SEQ ID NO: 1685 - DNA, 51 bp, synthetic construct
  misc_feature 1..51: note = Synthetic polynucleotide
  source 1..51: mol_type = other DNA
gaacttatcattgctgcttttgattaagatattggtcaaagagtacaaact

SEQ ID NO: 1686 - DNA, 51 bp, synthetic construct
  misc_feature 1..51: note = Synthetic polynucleotide
  source 1..51: mol_type = other DNA
ttcagctataatatgaataagaacttggaatcaaacatagagatctagtga

SEQ ID NO: 1687 - DNA, 51 bp, synthetic construct
  misc_feature 1..51: note = Synthetic polynucleotide
  source 1..51: mol_type = other DNA
ggggatgacagacaggtgcagggccrgcagctcgtagcacctgacagcctc

SEQ ID NO: 1688 - DNA, 51 bp, synthetic construct
  misc_feature 1..51: note = Synthetic polynucleotide
  source 1..51: mol_type = other DNA
gctggggtagaggtcctgaaccaggrggatgagggcaagcaggtcggccgg

SEQ ID NO: 1689 - DNA, 51 bp, synthetic construct
  misc_feature 1..51: note = Synthetic polynucleotide
  source 1..51: mol_type = other DNA
cctcttcaacatcggcctcctcctcytcctggtcatgttcatctactccat

SEQ ID NO: 1690 - DNA, 51 bp, synthetic construct
  misc_feature 1..51: note = Synthetic polynucleotide
  source 1..51: mol_type = other DNA
accttcatgctgctcttcgtcctggbgtgtgagattgcagagggcatcctg

SEQ ID NO: 1691 - DNA, 51 bp, synthetic construct
  misc_feature 1..51: note = Synthetic polynucleotide
  source 1..51: mol_type = other DNA
atcgagacttccaacttccccaagcygctaattggtaggtgaggtgtagga

SEQ ID NO: 1692 - DNA, 51 bp, synthetic construct
  misc_feature 1..51: note = Synthetic polynucleotide
  source 1..51: mol_type = other DNA
ttcctgcagcccttcgtgaatctgcygtccaaaggcacctactggtggatg

SEQ ID NO: 1693 - DNA, 51 bp, synthetic construct
  misc_feature 1..51: note = Synthetic polynucleotide
  source 1..51: mol_type = other DNA
attacttcataatatattgctgttaygtgttttaggccatgaccacaatgt

SEQ ID NO: 1694 - DNA, 51 bp, synthetic construct
  misc_feature 1..51: note = Synthetic polynucleotide
  source 1..51: mol_type = other DNA
ccgtgcccgccagcggagggcccgcbttgtgtccaagaaaggcaactgcaa

SEQ ID NO: 1695 - DNA, 51 bp, synthetic construct
  misc_feature 1..51: note = Synthetic polynucleotide
  source 1..51: mol_type = other DNA
gtgggtggcaacagcatcttcctggyggccccgctgatcatctaccatgtc

SEQ ID NO: 1696 - DNA, 51 bp, synthetic construct
  misc_feature 1..51: note = Synthetic polynucleotide
  source 1..51: mol_type = other DNA
ggcagcagcctgagagatggctcgcyggagctcatggtgagtgggtcagag

SEQ ID NO: 1697 - DNA, 51 bp, synthetic construct
  misc_feature 1..51: note = Synthetic polynucleotide
  source 1..51: mol_type = other DNA
gacttttcagctctttgtcctaaggyattttttgtttagttttcaatttgt

SEQ ID NO: 1698 - DNA, 51 bp, synthetic construct
  misc_feature 1..51: note = Synthetic polynucleotide
  source 1..51: mol_type = other DNA
ctacgggggtgacgacatcccacttyctccttatcgcatccgagccacaca

SEQ ID NO: 1699 - DNA, 51 bp, synthetic construct
  misc_feature 1..51: note = Synthetic polynucleotide
  source 1..51: mol_type = other DNA
ctccagtgaccgaacaattaaagaayatgcccaaaacatctggaacgtgga

SEQ ID NO: 1700 - DNA, 51 bp, synthetic construct
  misc_feature 1..51: note = Synthetic polynucleotide
  source 1..51: mol_type = other DNA
ccttgctctgcgatggactattcccyggctgcagccctcactcttcatggt

SEQ ID NO: 1701 - DNA, 51 bp, synthetic construct
  misc_feature 1..51: note = Synthetic polynucleotide
  source 1..51: mol_type = other DNA
taagtattgtgaaaactctgttttthtcaggtcgaatgagtgatttgagtg

SEQ ID NO: 1702 - DNA, 51 bp, synthetic construct
  misc_feature 1..51: note = Synthetic polynucleotide
  source 1..51: mol_type = other DNA
tgagacctatgcagatgccctgtggyggggcctggtgagtcactaccttgg

SEQ ID NO: 1703 - DNA, 51 bp, synthetic construct
  misc_feature 1..51: note = Synthetic polynucleotide
  source 1..51: mol_type = other DNA
tccaccccctgcagtgtcattggtcygagcttcgacttcgtggctctgaac

SEQ ID NO: 1704 - DNA, 51 bp, synthetic construct
  misc_feature 1..51: note = Synthetic polynucleotide
  source 1..51: mol_type = other DNA
gaacgagtgtgccaccgagaaccccygcgtgcaaacctgcgtcaacaccta

SEQ ID NO: 1705 - DNA, 51 bp, synthetic construct
  misc_feature 1..51: note = Synthetic polynucleotide
  source 1..51: mol_type = other DNA
tgatggttgtaagagtggaattaacygccctatccaaaaagacaagaccta

SEQ ID NO: 1706 - DNA, 51 bp, synthetic construct
  misc_feature 1..51: note = Synthetic polynucleotide
  source 1..51: mol_type = other DNA
catggtaagtatattgtaaaatacayatgtactaagaattttcaaaattgg

SEQ ID NO: 1707 - DNA, 51 bp, synthetic construct
  misc_feature 1..51: note = Synthetic polynucleotide
  source 1..51: mol_type = other DNA
ctcgtgggggatgttagcgtgcctgygcacggtgctctggcacctccctgc

SEQ ID NO: 1708 - DNA, 51 bp, synthetic construct
  misc_feature 1..51: note = Synthetic polynucleotide
  source 1..51: mol_type = other DNA
cctgcacctgggggctcatggcttcygacttctgaccttctcctcttcgct

SEQ ID NO: 1709 - DNA, 51 bp, synthetic construct
  misc_feature 1..51: note = Synthetic polynucleotide
  source 1..51: mol_type = other DNA
ctgccctttgccgagcgcctgcagcycctctctggacaccctcctgcctct

SEQ ID NO: 1710 - DNA, 51 bp, synthetic construct
  misc_feature 1..51: note = Synthetic polynucleotide
  source 1..51: mol_type = other DNA
ccggggcgcctcccgccaggcaccayggtgcagaagtcgcgcaacggcggc

SEQ ID NO: 1711 - DNA, 51 bp, synthetic construct
  misc_feature 1..51: note = Synthetic polynucleotide
  source 1..51: mol_type = other DNA
tgcatttcctttcttcccagagacaytgctgccagaaactgcctcttgacc

SEQ ID NO: 1712 - DNA, 51 bp, synthetic construct
  misc_feature 1..51: note = Synthetic polynucleotide
  source 1..51: mol_type = other DNA
ttccttctccttttcctttaccagaygtgcagtatgtgaagctccagctgt

SEQ ID NO: 1713 - DNA, 51 bp, synthetic construct
  misc_feature 1..51: note = Synthetic polynucleotide
  source 1..51: mol_type = other DNA
cttttcctttaccagatgtgcagtaygtgaagctccagctgtggtgatcgc

SEQ ID NO: 1714 - DNA, 51 bp, synthetic construct
  misc_feature 1..51: note = Synthetic polynucleotide
  source 1..51: mol_type = other DNA
cagtcagacgatccagattccccatygtcctcagggatgggattctctgtg

SEQ ID NO: 1715 - DNA, 51 bp, synthetic construct
  misc_feature 1..51: note = Synthetic polynucleotide
  source 1..51: mol_type = other DNA
taagaagcttaaacttcaaacagctyctatccaagcactgtgttccccctc

SEQ ID NO: 1716 - DNA, 51 bp, synthetic construct
  misc_feature 1..51: note = Synthetic polynucleotide
  source 1..51: mol_type = other DNA
agacttgaggacacgaattagccgaygtcaagtgtgcatgaagaggacata

SEQ ID NO: 1717 - DNA, 51 bp, synthetic construct
  misc_feature 1..51: note = Synthetic polynucleotide
  source 1..51: mol_type = other DNA
atttcctatagctcctgagtattggygttccattgcttactttgaaatgga

SEQ ID NO: 1718 - DNA, 51 bp, synthetic construct
  misc_feature 1..51: note = Synthetic polynucleotide
  source 1..51: mol_type = other DNA
ggacccttctggaggagatcgctttygtttgggtcaactctccaatgtcca

SEQ ID NO: 1719 - DNA, 51 bp, synthetic construct
  misc_feature 1..51: note = Synthetic polynucleotide
  source 1..51: mol_type = other DNA
attgaaattcacttacaccgggcccbccagctcctagacgaagtacttcat

SEQ ID NO: 1720 - DNA, 51 bp, synthetic construct
  misc_feature 1..51: note = Synthetic polynucleotide
  misc_difference 26: note = n is a, c, g, t or u
  source 1..51: mol_type = other DNA
taaagctggctatggcacctgcaacngcttccctgaggaggagaagtgctt

SEQ ID NO: 1721 - DNA, 51 bp, synthetic construct
  misc_feature 1..51: note = Synthetic polynucleotide
  source 1..51: mol_type = other DNA
accacccccacccacagatccactgygcgacgagctgtgccgcacggtgat

SEQ ID NO: 1722 - DNA, 51 bp, synthetic construct
  misc_feature 1..51: note = Synthetic polynucleotide
  source 1..51: mol_type = other DNA
gctctcatcagccgccaagaggcctyggagctcatgaaccagaaccttgac

SEQ ID NO: 1723 - DNA, 51 bp, synthetic construct
  misc_feature 1..51: note = Synthetic polynucleotide
  source 1..51: mol_type = other DNA
gaacccatgcctggagcctcaccgcytcaatgacacagaggtgattcctgc

SEQ ID NO: 1724 - DNA, 51 bp, synthetic construct
  misc_feature 1..51: note = Synthetic polynucleotide
  source 1..51: mol_type = other DNA
tttggcatcttcacatgctttgatayattgttctttgaccctgccatcaga

SEQ ID NO: 1725 - DNA, 51 bp, synthetic construct
  misc_feature 1..51: note = Synthetic polynucleotide
  source 1..51: mol_type = other DNA
gatatattgttctttgaccctgccaycagagtcctcagagactacaaggtg

SEQ ID NO: 1726 - DNA, 51 bp, synthetic construct
  misc_feature 1..51: note = Synthetic polynucleotide
  source 1..51: mol_type = other DNA
actgcctggatgaaccagctcccacycttggcagcaattgagattcagaaa

SEQ ID NO: 1727 - DNA, 51 bp, synthetic construct
  misc_feature 1..51: note = Synthetic polynucleotide
  source 1..51: mol_type = other DNA
ccatagtaagtttttaaaaattttgycaggcgatccgtactgtgagaagga

SEQ ID NO: 1728 - DNA, 51 bp, synthetic construct
  misc_feature 1..51: note = Synthetic polynucleotide
  source 1..51: mol_type = other DNA
gagatgatgtatgacaatttcacccyggtccctgtctggggaaaggaaggc

SEQ ID NO: 1729 - DNA, 51 bp, synthetic construct
  misc_feature 1..51: note = Synthetic polynucleotide
  source 1..51: mol_type = other DNA
gggaaaggaaggctatctccacgtcygttccaatggcctctgctgttattt

SEQ ID NO: 1730 - DNA, 51 bp, synthetic construct
  misc_feature 1..51: note = Synthetic polynucleotide
  source 1..51: mol_type = other DNA
tctccacgtctgttccaatggcctcygctgttatttactttacgagaggcc

SEQ ID NO: 1731 - DNA, 51 bp, synthetic construct
  misc_feature 1..51: note = Synthetic polynucleotide
  source 1..51: mol_type = other DNA
cacggggatatttgagtttcacctgyggggcaacttcagtacttcctatat

SEQ ID NO: 1732 - DNA, 51 bp, synthetic construct
  misc_feature 1..51: note = Synthetic polynucleotide
  source 1..51: mol_type = other DNA
tccttgtcggtaggtgaatccccagbacgatagcaccttcctgtttgacaa

SEQ ID NO: 1733 - DNA, 51 bp, synthetic construct
  misc_feature 1..51: note = Synthetic polynucleotide
  source 1..51: mol_type = other DNA
tgcagcctgatgcccccagtccaggyaacctggctccaactgctgctgggg

SEQ ID NO: 1734 - DNA, 51 bp, synthetic construct
  misc_feature 1..51: note = Synthetic polynucleotide
  source 1..51: mol_type = other DNA
gatactcctttacctcaggacccagygatcatccccttttccaagcaaagt

SEQ ID NO: 1735 - DNA, 51 bp, synthetic construct
  misc_feature 1..51: note = Synthetic polynucleotide
  source 1..51: mol_type = other DNA
tcaggacccagtgatcatcccctttyccaagcaaagtctgctcgaggagtc

SEQ ID NO: 1736 - DNA, 51 bp, synthetic construct
  misc_feature 1..51: note = Synthetic polynucleotide
  source 1..51: mol_type = other DNA
ttccaagcaaagtctgctcgaggagyctggtaactatggatttcccctctt

SEQ ID NO: 1737 - DNA, 51 bp, synthetic construct
  misc_feature 1..51: note = Synthetic polynucleotide
  source 1..51: mol_type = other DNA
tggtcggatgtaacgctgccactcahgtcggtccctgagatccgggctgtt

SEQ ID NO: 1738 - DNA, 51 bp, synthetic construct
  misc_feature 1..51: note = Synthetic polynucleotide
  source 1..51: mol_type = other DNA
tcggtccctgagatccgggctgttgytgatgcatgggcctcagtcacagag

SEQ ID NO: 1739 - DNA, 51 bp, synthetic construct
  misc_feature 1..51: note = Synthetic polynucleotide
  source 1..51: mol_type = other DNA
tgagatccgggctgttgttgatgcabgggcctcagtcacagaggagctggg

SEQ ID NO: 1740 - DNA, 51 bp, synthetic construct
  misc_feature 1..51: note = Synthetic polynucleotide
  source 1..51: mol_type = other DNA
gcatgggcctcagtcacagaggagcygggtgcccagtacccttgggtgcag

SEQ ID NO: 1741 - DNA, 51 bp, synthetic construct
  misc_feature 1..51: note = Synthetic polynucleotide
  source 1..51: mol_type = other DNA
agaggagctgggtgcccagtaccctygggtgcaggtttgtgaggtcgcccc

SEQ ID NO: 1742 - DNA, 51 bp, synthetic construct
  misc_feature 1..51: note = Synthetic polynucleotide
  source 1..51: mol_type = other DNA
ggtgcccagtacccttgggtgcaggyttgtgaggtcgccccttcccctgga

SEQ ID NO: 1743 - DNA, 51 bp, synthetic construct
  misc_feature 1..51: note = Synthetic polynucleotide
  source 1..51: mol_type = other DNA
gagctccgtatccctatctgatagahctttgaaaacaaaggtgccatgatg

SEQ ID NO: 1744 - DNA, 51 bp, synthetic construct
  misc_feature 1..51: note = Synthetic polynucleotide
  source 1..51: mol_type = other DNA
tgacaggtatgggccagcagtttccygccagatattgcccagcgtgaggag

SEQ ID NO: 1745 - DNA, 51 bp, synthetic construct
  misc_feature 1..51: note = Synthetic polynucleotide
  source 1..51: mol_type = other DNA
tataagagtcagcatggagagccccygctaatggagtacagccgccaggag

SEQ ID NO: 1746 - DNA, 51 bp, synthetic construct
  misc_feature 1..51: note = Synthetic polynucleotide
  source 1..51: mol_type = other DNA
ctaatggagtacagccgccaggagcyactcaggaaggtgggagagagccaa

SEQ ID NO: 1747 - DNA, 51 bp, synthetic construct
  misc_feature 1..51: note = Synthetic polynucleotide
  source 1..51: mol_type = other DNA
agccgccaggagctactcaggaaggygggagagagccaagccctgtgtccc

SEQ ID NO: 1748 - DNA, 51 bp, synthetic construct
  misc_feature 1..51: note = Synthetic polynucleotide
  source 1..51: mol_type = other DNA
agtactggtccccttctgggcaacayggccctaccagacactgctgctgcc

SEQ ID NO: 1749 - DNA, 51 bp, synthetic construct
  misc_feature 1..51: note = Synthetic polynucleotide
  source 1..51: mol_type = other DNA
ccattggcagctgcacgctcattacbaccctccgctcctgcgctctgccac

SEQ ID NO: 1750 - DNA, 51 bp, synthetic construct
  misc_feature 1..51: note = Synthetic polynucleotide
  source 1..51: mol_type = other DNA
cacgctcattactaccctccgctccygcgctctgccactgtccggaaattc

SEQ ID NO: 1751 - DNA, 51 bp, synthetic construct
  misc_feature 1..51: note = Synthetic polynucleotide
  source 1..51: mol_type = other DNA
ggacagggagacagcaaccatcgccygaccacgccgaccacagggccttga

SEQ ID NO: 1752 - DNA, 51 bp, synthetic construct
  misc_feature 1..51: note = Synthetic polynucleotide
  source 1..51: mol_type = other DNA
agaagagggcttcgtggagttgaagyctcccgcggtgagcggcgggctcgg

SEQ ID NO: 1753 - DNA, 51 bp, synthetic construct
  misc_feature 1..51: note = Synthetic polynucleotide
  source 1..51: mol_type = other DNA
catcaagtcttccttggtgaacgagyctgaaatcatcccggccagcaacgg

SEQ ID NO: 1754 - DNA, 51 bp, synthetic construct
  misc_feature 1..51: note = Synthetic polynucleotide
  source 1..51: mol_type = other DNA
gggtgactccgggggcccgctggtgygcgggggcgtgctcgagggcgtggt

SEQ ID NO: 1755 - DNA, 51 bp, synthetic construct
  misc_feature 1..51: note = Synthetic polynucleotide
  source 1..51: mol_type = other DNA
cccaacgtggatgagcattctgttaygacctacctgtcccagttccccaag

SEQ ID NO: 1756 - DNA, 51 bp, synthetic construct
  misc_feature 1..51: note = Synthetic polynucleotide
  source 1..51: mol_type = other DNA
atttttggggagcgccaggggatgcyggaggaagtagtgaaccccgaggcc

SEQ ID NO: 1757 - DNA, 51 bp, synthetic construct
  misc_feature 1..51: note = Synthetic polynucleotide
  source 1..51: mol_type = other DNA
ataataatgatggttgccaacatgcgctgagtgcttaaaatgtgccaggta

SEQ ID NO: 1758 - DNA, 51 bp, synthetic construct
  misc_feature 1..51: note = Synthetic polynucleotide
  source 1..51: mol_type = other DNA
ataaataggtaaagggctttagaattgtgcaccatactcacaaccaccctg

SEQ ID NO: 1759 - DNA, 51 bp, synthetic construct
  misc_feature 1..51: note = Synthetic polynucleotide
  source 1..51: mol_type = other DNA
cgcagcagattctgttattaaaccccttttacagacgaagttgaggctcac

SEQ ID NO: 1760 - DNA, 51 bp, synthetic construct
  misc_feature 1..51: note = Synthetic polynucleotide
  source 1..51: mol_type = other DNA
agagattatgtaactcactcaagacaacacagataaaagatgaaactgaat

SEQ ID NO: 1761 - DNA, 51 bp, synthetic construct
  misc_feature 1..51: note = Synthetic polynucleotide
  source 1..51: mol_type = other DNA
acaaattctacttactcctttgggtraagcatattcacccagaactgttgc

SEQ ID NO: 1762 - DNA, 51 bp, synthetic construct
  misc_feature 1..51: note = Synthetic polynucleotide
  source 1..51: mol_type = other DNA
caacggggaccctgtctgcaacgccygtggcctctactacaagctgcacaa

SEQ ID NO: 1763 - DNA, 51 bp, synthetic construct
  misc_feature 1..51: note = Synthetic polynucleotide
  source 1..51: mol_type = other DNA
caggaacttcacaacttattggaggyaataactttgtaagtggaacttact

SEQ ID NO: 1764 - DNA, 51 bp, synthetic construct
  misc_feature 1..51: note = Synthetic polynucleotide
  source 1..51: mol_type = other DNA
gggcggcccctccatcaaggacaagbatgtgacggcgctctacttcacctt

SEQ ID NO: 1765 - DNA, 51 bp, synthetic construct
  misc_feature 1..51: note = Synthetic polynucleotide
  source 1..51: mol_type = other DNA
ggaggaagaaccccaggtggacgtaygggagttgctgaagaacgcgaaacc

SEQ ID NO: 1766 - DNA, 51 bp, synthetic construct
  misc_feature 1..51: note = Synthetic polynucleotide
  source 1..51: mol_type = other DNA
cattccaagacacctgaagcaaaccyatatccgcagagttggagaagctgt

SEQ ID NO: 1767 - DNA, 51 bp, synthetic construct
  misc_feature 1..51: note = Synthetic polynucleotide
  source 1..51: mol_type = other DNA
aaactggtgaaggatggataccaaayggcccagcctgcatttgccccaaag

SEQ ID NO: 1768 - DNA, 51 bp, synthetic construct
  misc_feature 1..51: note = Synthetic polynucleotide
  source 1..51: mol_type = other DNA
ttgaccaatggtcatgtggccaagaytggggacttcgggctggctagggac

SEQ ID NO: 1769 - DNA, 51 bp, synthetic construct
  misc_feature 1..51: note = Synthetic polynucleotide
  source 1..51: mol_type = other DNA
gccgcgggactggctctggggcggcygcggcgacaacatcgactatggcta

SEQ ID NO: 1770 - DNA, 51 bp, synthetic construct
  misc_feature 1..51: note = Synthetic polynucleotide
  source 1..51: mol_type = other DNA
ctccacattccaactatgtaaaatabgtgctgaaaatgataaggatgtaaa

SEQ ID NO: 1771 - DNA, 51 bp, synthetic construct
  misc_feature 1..51: note = Synthetic polynucleotide
  source 1..51: mol_type = other DNA
tgataaggatgtaaagattgagcccygtggacacctcatgtgcacatcctg

SEQ ID NO: 1772 - DNA, 51 bp, synthetic construct
  misc_feature 1..51: note = Synthetic polynucleotide
  source 1..51: mol_type = other DNA
cagctgcaggctttggagcgtgtctytgagcggacacactatcctgatgct

SEQ ID NO: 1773 - DNA, 51 bp, synthetic construct
  misc_feature 1..51: note = Synthetic polynucleotide
  source 1..51: mol_type = other DNA
gcggcggccagggaggactacgtgcyggtggctggccactaccccgtgtgg

SEQ ID NO: 1774 - DNA, 51 bp, synthetic construct
  misc_feature 1..51: note = Synthetic polynucleotide
  source 1..51: mol_type = other DNA
ggctccccaacctgaagttaggagayatgtacttcctttgaatattgacaa

SEQ ID NO: 1775 - DNA, 51 bp, synthetic construct
  misc_feature 1..51: note = Synthetic polynucleotide
  source 1..51: mol_type = other DNA
tgagaacaatccagaaaggaaccacyggcattatcgagacctggaagctat

SEQ ID NO: 1776 - DNA, 51 bp, synthetic construct
  misc_feature 1..51: note = Synthetic polynucleotide
  source 1..51: mol_type = other DNA
catcctcaaacgaaacatccagcagyacaacagttttgtgtcactgtctgt

SEQ ID NO: 1777 - DNA, 51 bp, synthetic construct
  misc_feature 1..51: note = Synthetic polynucleotide
  source 1..51: mol_type = other DNA
ccatctttgctttctccaggtgaaaytgcactactgatgaatcgtcctcgt

SEQ ID NO: 1778 - DNA, 51 bp, synthetic construct
  misc_feature 1..51: note = Synthetic polynucleotide
  source 1..51: mol_type = other DNA
gaaatactacttctaccatggccttycctggccccaggtgggcagcttctg

SEQ ID NO: 1779 - DNA, 51 bp, synthetic construct
  misc_feature 1..51: note = Synthetic polynucleotide
  source 1..51: mol_type = other DNA
gtgtttgaagagttttgtcgggagaytggtgtgcgcaacatccgggagttt

SEQ ID NO: 1780 - DNA, 51 bp, synthetic construct
  misc_feature 1..51: note = Synthetic polynucleotide
  source 1..51: mol_type = other DNA
cgacccagatctgcggagtctgttcyccagggcaggaatcagcgaggccca

SEQ ID NO: 1781 - DNA, 51 bp, synthetic construct
  misc_feature 1..51: note = Synthetic polynucleotide
  source 1..51: mol_type = other DNA
acctctaaacttatctacgacttcaytgaggaccagggtgggctggaggct

SEQ ID NO: 1782 - DNA, 51 bp, synthetic construct
  misc_feature 1..51: note = Synthetic polynucleotide
  source 1..51: mol_type = other DNA
ttggtgcaactccaaataaaagtaayaaccatgcacactactataaccacc

SEQ ID NO: 1783 - DNA, 51 bp, synthetic construct
  misc_feature 1..51: note = Synthetic polynucleotide
  source 1..51: mol_type = other DNA
tcgaatttgcaattcaatatgaaaaycacctcggagctggtaaaaagaggc

SEQ ID NO: 1784 - DNA, 51 bp, synthetic construct
  misc_feature 1..51: note = Synthetic polynucleotide
  source 1..51: mol_type = other DNA
gacaacagaggcttacgaccccttayttaccgagaaagctcacaagaactg

SEQ ID NO: 1785 - DNA, 51 bp, synthetic construct
  misc_feature 1..51: note = Synthetic polynucleotide
  source 1..51: mol_type = other DNA
ggagatgacttgattgtgactccatbtgctcaggtaagcacagcttggtga

SEQ ID NO: 1786 - DNA, 51 bp, synthetic construct
  misc_feature 1..51: note = Synthetic polynucleotide
  source 1..51: mol_type = other DNA
gttacccgtggtgcctcacgctgagygcaaaactagctatgagtcccgctc

SEQ ID NO: 1787 - DNA, 51 bp, synthetic construct
  misc_feature 1..51: note = Synthetic polynucleotide
  source 1..51: mol_type = other DNA
tttacaagatgaatatgacttcaaaygcaaaaccttgcagaacagaggtaa

SEQ ID NO: 1788 - DNA, 51 bp, synthetic construct
  misc_feature 1..51: note = Synthetic polynucleotide
  source 1..51: mol_type = other DNA
tgctgtgagagccattggaagactgycctctatggcaatgatctcagggct

SEQ ID NO: 1789 - DNA, 51 bp, synthetic construct
  misc_feature 1..51: note = Synthetic polynucleotide
  source 1..51: mol_type = other DNA
tcacccgtggtggtggcctcgtcgcyagggctcgtgtcgctgggcggcaag

SEQ ID NO: 1790 - DNA, 51 bp, synthetic construct
  misc_feature 1..51: note = Synthetic polynucleotide
  source 1..51: mol_type = other DNA
gaggaacgaatgatcagggagaaacbgaaggcaacctgtatgccagcctgg

SEQ ID NO: 1791 - DNA, 51 bp, synthetic construct
  misc_feature 1..51: note = Synthetic polynucleotide
  source 1..51: mol_type = other DNA
gttgatgaccttcgtcgcttatgcayactcaggatgagttttgtgaaaggc

SEQ ID NO: 1792 - DNA, 51 bp, synthetic construct
  misc_feature 1..51: note = Synthetic polynucleotide
  source 1..51: mol_type = other DNA
ctgttgctcacagctgtggaccttcygggccgggaccgtgatgggctgggt

SEQ ID NO: 1793 - DNA, 51 bp, synthetic construct
  misc_feature 1..51: note = Synthetic polynucleotide
  source 1..51: mol_type = other DNA
aagaaacgtgctcgagtacagtggtytgtccgattctgtgaagtccctgcc

SEQ ID NO: 1794 - DNA, 51 bp, synthetic construct
  misc_feature 1..51: note = Synthetic polynucleotide
  source 1..51: mol_type = other DNA
ctcggctgtcctggctctgcaggagygtgaccactcccagacagactccct

SEQ ID NO: 1795 - DNA, 51 bp, synthetic construct
  misc_feature 1..51: note = Synthetic polynucleotide
  source 1..51: mol_type = other DNA
ctgtggtggttattgctctgtgttayaaactctgggaaattccatctcttg

SEQ ID NO: 1796 - DNA, 51 bp, synthetic construct
  misc_feature 1..51: note = Synthetic polynucleotide
  source 1..51: mol_type = other DNA
tggtgtaatggagtgatagtacgttdgtggaaagatgaagaatggacattc

SEQ ID NO: 1797 - DNA, 51 bp, synthetic construct
  misc_feature 1..51: note = Synthetic polynucleotide
  source 1..51: mol_type = other DNA
ctgcagcgagtgctctaccgccacaygcaggccaagggcgtgctgctgact

SEQ ID NO: 1798 - DNA, 51 bp, synthetic construct
  misc_feature 1..51: note = Synthetic polynucleotide
  source 1..51: mol_type = other DNA
gagatttcttttaagcaacaacagtrcaaaaccactgcaggtatgtaaatc

SEQ ID NO: 1799 - DNA, 51 bp, synthetic construct
  misc_feature 1..51: note = Synthetic polynucleotide
  source 1..51: mol_type = other DNA
ttgcctctctgccttccaggtcttcyccaagatcttcagccacgaggccct

SEQ ID NO: 1800 - DNA, 51 bp, synthetic construct
  misc_feature 1..51: note = Synthetic polynucleotide
  source 1..51: mol_type = other DNA
gttcaccaacggcatgcgccatggcyacggagtacgccagagcgtgcccta

SEQ ID NO: 1801 - DNA, 51 bp, synthetic construct
  misc_feature 1..51: note = Synthetic polynucleotide
  source 1..51: mol_type = other DNA
ccccagcgttttgggtgctccggggrtgacaccagtaagggttcagcagtg

SEQ ID NO: 1802 - DNA, 51 bp, synthetic construct
  misc_feature 1..51: note = Synthetic polynucleotide
  source 1..51: mol_type = other DNA
ctttatctgcataataaccagcttcyagctggagggctgcatgcagggaag

SEQ ID NO: 1803 - DNA, 51 bp, synthetic construct
  misc_feature 1..51: note = Synthetic polynucleotide
  source 1..51: mol_type = other DNA
cagagacatcatgttggaagaattaycccatctcagtaaccgtggtgccag

SEQ ID NO: 1804 - DNA, 51 bp, synthetic construct
  misc_feature 1..51: note = Synthetic polynucleotide
  source 1..51: mol_type = other DNA
ccaataattttcaaggaagaaaatcytagggtaaggtgacttaggttttat

SEQ ID NO: 1805 - DNA, 51 bp, synthetic construct
  misc_feature 1..51: note = Synthetic polynucleotide
  source 1..51: mol_type = other DNA
ttgtcctatccctcctccagggcccygcactcagaagggaagttacctaaa

SEQ ID NO: 1806 - DNA, 51 bp, synthetic construct
  misc_feature 1..51: note = Synthetic polynucleotide
  source 1..51: mol_type = other DNA
attttgttctttctatttgaagctcytttaagagcctgtgccgatggaggt

SEQ ID NO: 1807 - DNA, 51 bp, synthetic construct
  misc_feature 1..51: note = Synthetic polynucleotide
  source 1..51: mol_type = other DNA
tgtcccttctcactgaccatctctcycaacagctccaattatgctttcatg

SEQ ID NO: 1808 - DNA, 51 bp, synthetic construct
  misc_feature 1..51: note = Synthetic polynucleotide
  source 1..51: mol_type = other DNA
cccattcttccatttgctccgcagcyggtattccctctcgagtggtttcca

SEQ ID NO: 1809 - DNA, 51 bp, synthetic construct
  misc_feature 1..51: note = Synthetic polynucleotide
  source 1..51: mol_type = other DNA
tttgtgaggtccagcacctacagccygatccccatcactgtggccgaggca

SEQ ID NO: 1810 - DNA, 51 bp, synthetic construct
  misc_feature 1..51: note = Synthetic polynucleotide
  source 1..51: mol_type = other DNA
ctggtggcccaggtggatagtggccyctaccctgggctcatctggctacac

SEQ ID NO: 1811 - DNA, 51 bp, synthetic construct
  misc_feature 1..51: note = Synthetic polynucleotide
  source 1..51: mol_type = other DNA
ggaaatgttggcatagtgatgtcctyggaacaaataaaggtaaacagcatg

SEQ ID NO: 1812 - DNA, 51 bp, synthetic construct
  misc_feature 1..51: note = Synthetic polynucleotide
  source 1..51: mol_type = other DNA
tttattttttagcgtattttctcacygctagaaaagacttggcttggcgca

SEQ ID NO: 1813 - DNA, 51 bp, synthetic construct
  misc_feature 1..51: note = Synthetic polynucleotide
  source 1..51: mol_type = other DNA
aagtaaaaaataccagtctgatatgyactgggcacagtcacaagatggact

SEQ ID NO: 1814 - DNA, 51 bp, synthetic construct
  misc_feature 1..51: note = Synthetic polynucleotide
  source 1..51: mol_type = other DNA
gtagtcctcaaggtttataagaatgwgagtcatggagcaacaggtcctctt

SEQ ID NO: 1815 - DNA, 51 bp, synthetic construct
  misc_feature 1..51: note = Synthetic polynucleotide
  source 1..51: mol_type = other DNA
gagctggacagctggattgacaagtyttgtctggatgctgatgtgtttgtg

SEQ ID NO: 1816 - DNA, 51 bp, synthetic construct
  misc_feature 1..51: note = Synthetic polynucleotide
  source 1..51: mol_type = other DNA
gtaaactcaattgcaattgtgttacytttattatttggatgaatatcagtg

SEQ ID NO: 1817 - DNA, 51 bp, synthetic construct
  misc_feature 1..51: note = Synthetic polynucleotide
  source 1..51: mol_type = other DNA
ttcgagcttctcagtatatttagtcrtactgttacctaaaaagaaaataag

SEQ ID NO: 1818 - DNA, 51 bp, synthetic construct
  misc_feature 1..51: note = Synthetic polynucleotide
  source 1..51: mol_type = other DNA
cctgctgcagctcacctgcgtcagcygcgtgcgcgccgtcatgaactcgcg

SEQ ID NO: 1819 - DNA, 51 bp, synthetic construct
  misc_feature 1..51: note = Synthetic polynucleotide
  source 1..51: mol_type = other DNA
agcaaccagggctacgtgcgccagcyctcccagggtgagccgcagtgtggg

SEQ ID NO: 1820 - DNA, 51 bp, synthetic construct
  misc_feature 1..51: note = Synthetic polynucleotide
  source 1..51: mol_type = other DNA
ggcgcgctgagcaacgcggtcttccycaccgcgctctgcttcaccatcttc

SEQ ID NO: 1821 - DNA, 51 bp, synthetic construct
  misc_feature 1..51: note = Synthetic polynucleotide
  source 1..51: mol_type = other DNA
cagtccatttgaatttggcttcacaytccgtaacccagatgatgtcttcag

SEQ ID NO: 1822 - DNA, 51 bp, synthetic construct
  misc_feature 1..51: note = Synthetic polynucleotide
  source 1..51: mol_type = other DNA
caaaagaattatctttgctatgaccyggctgagctcttattaaaattgaaa

SEQ ID NO: 1823 - DNA, 51 bp, synthetic construct
  misc_feature 1..51: note = Synthetic polynucleotide
  source 1..51: mol_type = other DNA
tgactgcgaccacatttctgggcagygtacttgccgcactggattcatggg

SEQ ID NO: 1824 - DNA, 51 bp, synthetic construct
  misc_feature 1..51: note = Synthetic polynucleotide
  source 1..51: mol_type = other DNA
cgttctctgtgctgagacctgccagygtgtcaacggagggaagtgttacca

SEQ ID NO: 1825 - DNA, 51 bp, synthetic construct
  misc_feature 1..51: note = Synthetic polynucleotide
  source 1..51: mol_type = other DNA
gaagcgctacgcggacgcccagctgycctgccagggccgcgggggcacgct

SEQ ID NO: 1826 - DNA, 51 bp, synthetic construct
  misc_feature 1..51: note = Synthetic polynucleotide
  source 1..51: mol_type = other DNA
gccccagaagaacccgtgtgaacatrctgtcctttggccgcctggcagtta

SEQ ID NO: 1827 - DNA, 51 bp, synthetic construct
  misc_feature 1..51: note = Synthetic polynucleotide
  source 1..51: mol_type = other DNA
ccttctatcataatacagagcccagrgcagagtaatggtgagaatcatggc

SEQ ID NO: 1828 - DNA, 51 bp, synthetic construct
  misc_feature 1..51: note = Synthetic polynucleotide
  source 1..51: mol_type = other DNA
ctccttgcccaggccgcccacgtacrgacgctcgtccttcactgccagcca

SEQ ID NO: 1829 - DNA, 51 bp, synthetic construct
  misc_feature 1..51: note = Synthetic polynucleotide
  source 1..51: mol_type = other DNA
tggcatgtacgtagtaggcatccagyggaaccacatgggcagcgtgttagc

SEQ ID NO: 1830 - DNA, 51 bp, synthetic construct
  misc_feature 1..51: note = Synthetic polynucleotide
  source 1..51: mol_type = other DNA
tcaacagtactgcctgggggctgccycgcctgtgacaaccatgccctccag

SEQ ID NO: 1831 - DNA, 51 bp, synthetic construct
  misc_feature 1..51: note = Synthetic polynucleotide
  source 1..51: mol_type = other DNA
agggcccaggtcagaatgaggacctrccggccaggtgagaagggcacgtgc

SEQ ID NO: 1832 - DNA, 51 bp, synthetic construct
  misc_feature 1..51: note = Synthetic polynucleotide
  source 1..51: mol_type = other DNA
attgcagtccatgtagtcagagtgcygacctgcatcatgagtgactccccc

SEQ ID NO: 1833 - DNA, 51 bp, synthetic construct
  misc_feature 1..51: note = Synthetic polynucleotide
  source 1..51: mol_type = other DNA
gctggcagctcggccccgccgccgcyattaccccggccagggcctggggct

SEQ ID NO: 1834 - DNA, 51 bp, synthetic construct
  misc_feature 1..51: note = Synthetic polynucleotide
  source 1..51: mol_type = other DNA
gcttaccgcccccctcccttccagaytgtggatccgctggcccggggccgg

SEQ ID NO: 1835 - DNA, 51 bp, synthetic construct
  misc_feature 1..51: note = Synthetic polynucleotide
  source 1..51: mol_type = other DNA
ggctctgtggatggacggcacctgcygcggaccctgtcccgagcgaagttc

SEQ ID NO: 1836 - DNA, 51 bp, synthetic construct
  misc_feature 1..51: note = Synthetic polynucleotide
  source 1..51: mol_type = other DNA
gaaaatgaaggaactgaagaaaattygcaagtatgtcttagggttcagtaa

SEQ ID NO: 1837 - DNA, 51 bp, synthetic construct
  misc_feature 1..51: note = Synthetic polynucleotide
  source 1..51: mol_type = other DNA
ttgtttcctcagtctataccaaaacycacctttcctggtggtttactaatt

SEQ ID NO: 1838 - DNA, 51 bp, synthetic construct
  misc_feature 1..51: note = Synthetic polynucleotide
  source 1..51: mol_type = other DNA
ctcatcgagtacctcatccaccgctycctgttccacatgaagccccccagc

SEQ ID NO: 1839 - DNA, 51 bp, synthetic construct
  misc_feature 1..51: note = Synthetic polynucleotide
  source 1..51: mol_type = other DNA
aaaataaacattccatttgatgaatyaaagaattatttgtctgaagcaaca

SEQ ID NO: 1840 - DNA, 51 bp, synthetic construct
  misc_feature 1..51: note = Synthetic polynucleotide
  source 1..51: mol_type = other DNA
tcggctcagaaacactaaatacaaayctgctccggctgctgaaaagaaagt

SEQ ID NO: 1841 - DNA, 51 bp, synthetic construct
  misc_feature 1..51: note = Synthetic polynucleotide
  source 1..51: mol_type = other DNA
agtatttggaatgaatggaagaataygggttaaggcaaaaaccatccagca

SEQ ID NO: 1842 - DNA, 51 bp, synthetic construct
  misc_feature 1..51: note = Synthetic polynucleotide
  source 1..51: mol_type = other DNA
caggtggcccgtaagctggtcatcaytgagagcgacctggaacgtgcagag

SEQ ID NO: 1843 - DNA, 51 bp, synthetic construct
  misc_feature 1..51: note = Synthetic polynucleotide
  source 1..51: mol_type = other DNA
gagctggaccacgctctcaacgataygacttccatgtaaacgttcatccac

SEQ ID NO: 1844 - DNA, 51 bp, synthetic construct
  misc_feature 1..51: note = Synthetic polynucleotide
  source 1..51: mol_type = other DNA
ggagtacagtgcaatgagggaccagyacatgaggactggggagggctttct

SEQ ID NO: 1845 - DNA, 51 bp, synthetic construct
  misc_feature 1..51: note = Synthetic polynucleotide
  source 1..51: mol_type = other DNA
tttttctttgttttttaaggaacacygtccattggcatggggaaatataaa

SEQ ID NO: 1846 - DNA, 51 bp, synthetic construct
  misc_feature 1..51: note = Synthetic polynucleotide
  source 1..51: mol_type = other DNA
tgaatctatcagtttgcttgagttaygtcgaaatacgaacagaaaacaagc

SEQ ID NO: 1847 - DNA, 51 bp, synthetic construct
  misc_feature 1..51: note = Synthetic polynucleotide
  source 1..51: mol_type = other DNA
attaagtcagatgcggccatgactgycgctgtaaagatgctcaagcgtaag

SEQ ID NO: 1848 - DNA, 51 bp, synthetic construct
  misc_feature 1..51: note = Synthetic polynucleotide
  source 1..51: mol_type = other DNA
cgcgcgctgtcgcccgcagatttctycgccaagcgcaagagatcagcgcct

SEQ ID NO: 1849 - DNA, 51 bp, synthetic construct
  misc_feature 1..51: note = Synthetic polynucleotide
  source 1..51: mol_type = other DNA
agactattggctggccacatggacaycggagtacagtataaacaatactgg

SEQ ID NO: 1850 - DNA, 51 bp, synthetic construct
  misc_feature 1..51: note = Synthetic polynucleotide
  source 1..51: mol_type = other DNA
atgcctggtcagcttaatgtgctgcyggctgaggctggtgtgccatatgac

SEQ ID NO: 1851 - DNA, 51 bp, synthetic construct
  misc_feature 1..51: note = Synthetic polynucleotide
  source 1..51: mol_type = other DNA
gtgctgctgcggcggtgccagcagcygcaggagcacctgggcctggccgag

SEQ ID NO: 1852 - DNA, 51 bp, synthetic construct
  misc_feature 1..51: note = Synthetic polynucleotide
  source 1..51: mol_type = other DNA
gatgggttttatttccagacttcacytctaatggtgattatgggagaactg

SEQ ID NO: 1853 - DNA, 51 bp, synthetic construct
  misc_feature 1..51: note = Synthetic polynucleotide
  misc_difference 26: note = n is a, c, g, t or u
  source 1..51: mol_type = other DNA
cactagcaacctcaaacagacaccanggtgcatctgactcctgaggagaag

SEQ ID NO: 1854 - DNA, 51 bp, synthetic construct
  misc_feature 1..51: note = Synthetic polynucleotide
  source 1..51: mol_type = other DNA
ccttgagcatctggattctgcctaahaaaaaacatttattttcattgcaat

SEQ ID NO: 1855 - DNA, 51 bp, synthetic construct
  misc_feature 1..51: note = Synthetic polynucleotide
  misc_difference 26: note = n is a, c, g, t or u
  source 1..51: mol_type = other DNA
agttggtggtgaggccctgggcaggntggtatcaaggttacaagacaggtt

SEQ ID NO: 1856 - DNA, 51 bp, synthetic construct
  misc_feature 1..51: note = Synthetic polynucleotide
  source 1..51: mol_type = other DNA
accacatatgcacacatatctccagygatcccctgggctccagagaaccta

SEQ ID NO: 1857 - DNA, 51 bp, synthetic construct
  misc_feature 1..51: note = Synthetic polynucleotide
  source 1..51: mol_type = other DNA
gctgtggttggggcctgccaggcccygggtctccgggatgtccacctcgcc

SEQ ID NO: 1858 - DNA, 51 bp, synthetic construct
  misc_feature 1..51: note = Synthetic polynucleotide
  source 1..51: mol_type = other DNA
ccgccatcgtaggcaggcggctcccvctgtactgtgcaggagtcctctccc

SEQ ID NO: 1859 - DNA, 51 bp, synthetic construct
  misc_feature 1..51: note = Synthetic polynucleotide
  source 1..51: mol_type = other DNA
gaggagcgggcggtgaaggacgagcygctgggcgagaagcccgagatcaag

SEQ ID NO: 1860 - DNA, 51 bp, synthetic construct
  misc_feature 1..51: note = Synthetic polynucleotide
  source 1..51: mol_type = other DNA
cctcctccagcgctagtcctgctgaygggcaaagaaggtgtccacggtggt

SEQ ID NO: 1861 - DNA, 51 bp, synthetic construct
  misc_feature 1..51: note = Synthetic polynucleotide
  source 1..51: mol_type = other DNA
cttgcaggtgcccatcagaagcgacygatccccatcaagtacaaggcaatg

SEQ ID NO: 1862 - DNA, 51 bp, synthetic construct
  misc_feature 1..51: note = Synthetic polynucleotide
  source 1..51: mol_type = other DNA
gccagtgatgacaagactgttaagcygtgggacaagagcagccgggaatgt

SEQ ID NO: 1863 - DNA, 51 bp, synthetic construct
  misc_feature 1..51: note = Synthetic polynucleotide
  source 1..51: mol_type = other DNA
cccccgaaactccttgaccctgcccyccatccccgcaggcatcagcaacat

SEQ ID NO: 1864 - DNA, 51 bp, synthetic construct
  misc_feature 1..51: note = Synthetic polynucleotide
  source 1..51: mol_type = other DNA
ctcctccgcctaggtccctgccatcycactggcgtacgaggctgccgaaag

SEQ ID NO: 1865 - DNA, 51 bp, synthetic construct
  misc_feature 1..51: note = Synthetic polynucleotide
  source 1..51: mol_type = other DNA
gagaaacactgcagaagctaagacayaggaattctacagcatgatatttca

SEQ ID NO: 1866 - DNA, 51 bp, synthetic construct
  misc_feature 1..51: note = Synthetic polynucleotide
  source 1..51: mol_type = other DNA
acacttaatgattgttggcaagaaaygtgctgctgatctgggcctgaataa

SEQ ID NO: 1867 - DNA, 51 bp, synthetic construct
  misc_feature 1..51: note = Synthetic polynucleotide
  source 1..51: mol_type = other DNA
ttccacccctggtcggatgtaacgcygccactcatgtcggtccctgagatc

SEQ ID NO: 1868 - DNA, 51 bp, synthetic construct
  misc_feature 1..51: note = Synthetic polynucleotide
  source 1..51: mol_type = other DNA
ctcccgtcaccacccagtaaggtcaygtgcttccacccctggtcggatgta

SEQ ID NO: 1869 - DNA, 51 bp, synthetic construct
  misc_feature 1..51: note = Synthetic polynucleotide
  source 1..51: mol_type = other DNA
atggagtacagccgccaggagctacycaggaaggtgggagagagccaagcc

SEQ ID NO: 1870 - DNA, 51 bp, synthetic construct
  misc_feature 1..51: note = Synthetic polynucleotide
  source 1..51: mol_type = other DNA
gcctgaccccagaagaatttgtgagbgtatccatatgtatctccctaatga

SEQ ID NO: 1871 - DNA, 51 bp, synthetic construct
  misc_feature 1..51: note = Synthetic polynucleotide
  source 1..51: mol_type = other DNA
ctactcatgttgttatgaaaacaggyataccaagaacctttacagaatacc

SEQ ID NO: 1872 - DNA, 51 bp, synthetic construct
  misc_feature 1..51: note = Synthetic polynucleotide
  source 1..51: mol_type = other DNA
ggtttctttcagcatgattttgaagbcagaggagatgtggtcaatggaaga

SEQ ID NO: 1873 - DNA, 51 bp, synthetic construct
  misc_feature 1..51: note = Synthetic polynucleotide
  source 1..51: mol_type = other DNA
tgaagccctgttgaggggagaacttrccacaaagccacagcccagggacac

SEQ ID NO: 1874 - DNA, 51 bp, synthetic construct
  misc_feature 1..51: note = Synthetic polynucleotide
  source 1..51: mol_type = other DNA
gaggagaattctgtcccctaccaggygtccctgaattctggctaccacttc

SEQ ID NO: 1875 - DNA, 51 bp, synthetic construct
  misc_feature 1..51: note = Synthetic polynucleotide
  source 1..51: mol_type = other DNA
gattttcttctctttatctgctgcayggggaggcctgatcactctctcttc

SEQ ID NO: 1876 - DNA, 51 bp, synthetic construct
  misc_feature 1..51: note = Synthetic polynucleotide
  source 1..51: mol_type = other DNA
ttctccagccaagtagcccagggcayggccttcctcgcttccaagaatgtg

SEQ ID NO: 1877 - DNA, 51 bp, synthetic construct
  misc_feature 1..51: note = Synthetic polynucleotide
  source 1..51: mol_type = other DNA
tatggcatcctcctctgggagatctyctcacttggtgagccactgggccca

SEQ ID NO: 1878 - DNA, 51 bp, synthetic construct
  misc_feature 1..51: note = Synthetic polynucleotide
  source 1..51: mol_type = other DNA
ctggtgaacagcaagttctataaacbggtgaaggatggataccaaatggcc

SEQ ID NO: 1879 - DNA, 51 bp, synthetic construct
  misc_feature 1..51: note = Synthetic polynucleotide
  source 1..51: mol_type = other DNA
atttttcagattgttcagtttggcabgaatgaaaaggttgggcaaatctcc

SEQ ID NO: 1880 - DNA, 51 bp, synthetic construct
  misc_feature 1..51: note = Synthetic polynucleotide
  source 1..51: mol_type = other DNA
gtaagtggaaagattattgccacccygcacatcaagtatcctaaggacagg

SEQ ID NO: 1881 - DNA, 51 bp, synthetic construct
  misc_feature 1..51: note = Synthetic polynucleotide
  source 1..51: mol_type = other DNA
gcggagggctgtgtccccggcgcttycggggggcctcagggcgcggaggac

SEQ ID NO: 1882 - DNA, 51 bp, synthetic construct
  misc_feature 1..51: note = Synthetic polynucleotide
  source 1..51: mol_type = other DNA
tatgagcatccatccatcctgagtcygaaccctctggctctcatcagccgc

SEQ ID NO: 1883 - DNA, 51 bp, synthetic construct
  misc_feature 1..51: note = Synthetic polynucleotide
  source 1..51: mol_type = other DNA
tttcctggtttacagggtcctccagyaagttataaaatttgggattatgat

SEQ ID NO: 1884 - DNA, 51 bp, synthetic construct
  misc_feature 1..51: note = Synthetic polynucleotide
  source 1..51: mol_type = other DNA
caggcagcagaagatgtcgttttcaytggacctgacacacatgctattcaa

SEQ ID NO: 1885 - DNA, 51 bp, synthetic construct
  misc_feature 1..51: note = Synthetic polynucleotide
  source 1..51: mol_type = other DNA
acacgtgcccgaatctgctgtgaccyggatgtcttggccagcaagaaggta

SEQ ID NO: 1886 - DNA, 51 bp, synthetic construct
  misc_feature 1..51: note = Synthetic polynucleotide
  source 1..51: mol_type = other DNA
cataaggagcgccccacagtcatgcygtttccctttaggaatctcggctca

SEQ ID NO: 1887 - DNA, 51 bp, synthetic construct
  misc_feature 1..51: note = Synthetic polynucleotide
  source 1..51: mol_type = other DNA
taaggagcgccccacagtcatgctgyttccctttaggaatctcggctcacc

SEQ ID NO: 1888 - DNA, 51 bp, synthetic construct
  misc_feature 1..51: note = Synthetic polynucleotide
  source 1..51: mol_type = other DNA
tcaatgcctgtagctattgcattaaygaccacagcggtcatctctacctgc

SEQ ID NO: 1889 - DNA, 51 bp, synthetic construct
  misc_feature 1..51: note = Synthetic polynucleotide
  source 1..51: mol_type = other DNA
aagctgatgatcaagcagggccttcyggacaagcatgggaagcccacagac

SEQ ID NO: 1890 - DNA, 51 bp, synthetic construct
  misc_feature 1..51: note = Synthetic polynucleotide
  source 1..51: mol_type = other DNA
caggaaaaagagaaaaaatcagtggyaagtccctcttttatgtgtactctc

SEQ ID NO: 1891 - DNA, 51 bp, synthetic construct
  misc_feature 1..51: note = Synthetic polynucleotide
  source 1..51: mol_type = other DNA
gaatacctggaagcaattcaccatcyccatgaggagtggctcatcaaaggc

SEQ ID NO: 1892 - DNA, 51 bp, synthetic construct
  misc_feature 1..51: note = Synthetic polynucleotide
  source 1..51: mol_type = other DNA
atcgaagggctgtcccagaagtttayttacctaaatgatgatgtcatgttt

SEQ ID NO: 1893 - DNA, 51 bp, synthetic construct
  misc_feature 1..51: note = Synthetic polynucleotide
  source 1..51: mol_type = other DNA
tttgccttctcttatttttattatcycatgagtgcagtgcagccactgaat

SEQ ID NO: 1894 - DNA, 51 bp, synthetic construct
  misc_feature 1..51: note = Synthetic polynucleotide
  source 1..51: mol_type = other DNA
ccgccatcctctcaggtttcacgcaygtgtgctgcagctcccatttcatca

SEQ ID NO: 1895 - DNA, 51 bp, synthetic construct
  misc_feature 1..51: note = Synthetic polynucleotide
  source 1..51: mol_type = other DNA
tacaactgcagctgcaataaactggyccttatacctgttgggttctaaccc

SEQ ID NO: 1896 - DNA, 51 bp, synthetic construct
  misc_feature 1..51: note = Synthetic polynucleotide
  source 1..51: mol_type = other DNA
tgctcaaagtaatgatgattccgagyatgtccgtgcagtttataggtaaat

SEQ ID NO: 1897 - DNA, 51 bp, synthetic construct
  misc_feature 1..51: note = Synthetic polynucleotide
  source 1..51: mol_type = other DNA
gccaagcccaaccagataagcctcaycaacatggacctgcccatggtgagt

SEQ ID NO: 1898 - DNA, 51 bp, synthetic construct
  misc_feature 1..51: note = Synthetic polynucleotide
  source 1..51: mol_type = other DNA
ctcggccgcaagattctggccgccaycattatgaaaaaagactctgaggac

SEQ ID NO: 1899 - DNA, 51 bp, synthetic construct
  misc_feature 1..51: note = Synthetic polynucleotide
  source 1..51: mol_type = other DNA
atcgaagagtatttgaccaaagagcygctggccctggattcagtggacccc

SEQ ID NO: 1900 - DNA, 51 bp, synthetic construct
  misc_feature 1..51: note = Synthetic polynucleotide
  source 1..51: mol_type = other DNA
ttttatgtcacgaggcctagaaatcygtctgaacagtcaagtcctcctggt

SEQ ID NO: 1901 - DNA, 51 bp, synthetic construct
  misc_feature 1..51: note = Synthetic polynucleotide
  source 1..51: mol_type = other DNA
ttggggctgagtcctgaagaggccayggagctgctgcagggtcagggccca

SEQ ID NO: 1902 - DNA, 51 bp, synthetic construct
  misc_feature 1..51: note = Synthetic polynucleotide
  source 1..51: mol_type = other DNA
aacctgtgttgtggtttacactggayatggaaatagagaggagcaaaatct

SEQ ID NO: 1903 - DNA, 51 bp, synthetic construct
  misc_feature 1..51: note = Synthetic polynucleotide
  source 1..51: mol_type = other DNA
aggaggaattgtcttaagtgtagaaycaatgaaaagacttaacagccttct

SEQ ID NO: 1904 - DNA, 51 bp, synthetic construct
  misc_feature 1..51: note = Synthetic polynucleotide
  source 1..51: mol_type = other DNA
ttagcactggcctttgtgctggcacyggcatgctgtgcctcgaatgtcact

SEQ ID NO: 1905 - DNA, 51 bp, synthetic construct
  misc_feature 1..51: note = Synthetic polynucleotide
  source 1..51: mol_type = other DNA
gctcactgcaggtccttggcagggcygggcggcctctctctgctgggcgtg

SEQ ID NO: 1906 - DNA, 51 bp, synthetic construct
  misc_feature 1..51: note = Synthetic polynucleotide
  source 1..51: mol_type = other DNA
tcggagctgaagatcatgagtcaccytgggccccacctgaacgtggtcaac

SEQ ID NO: 1907 - DNA, 51 bp, synthetic construct
  misc_feature 1..51: note = Synthetic polynucleotide
  source 1..51: mol_type = other DNA
caacagctatgaagacgccaaggccyacgggttcaagaacaagctgatcat

SEQ ID NO: 1908 - DNA, 51 bp, synthetic construct
  misc_feature 1..51: note = Synthetic polynucleotide
  source 1..51: mol_type = other DNA
actatagatcattttaattgcatttrtaagtgtaggaatagcatccatcat

SEQ ID NO: 1909 - DNA, 51 bp, synthetic construct
  misc_feature 1..51: note = Synthetic polynucleotide
  source 1..51: mol_type = other DNA
gtccagtacctgtaccgagagttgcyggttcaccttgacgatccagagagg

SEQ ID NO: 1910 - DNA, 51 bp, synthetic construct
  misc_feature 1..51: note = Synthetic polynucleotide
  source 1..51: mol_type = other DNA
gaggggaacctcactttcaacgactytgtggacatgttttccgtgctctgc

SEQ ID NO: 1911 - DNA, 51 bp, synthetic construct
  misc_feature 1..51: note = Synthetic polynucleotide
  source 1..51: mol_type = other DNA
acagacttcaacactgacaacttcayctgcaaggaggacctggagctgacg

SEQ ID NO: 1912 - DNA, 51 bp, synthetic construct
  misc_feature 1..51: note = Synthetic polynucleotide
  source 1..51: mol_type = other DNA
ttagttgttacttcttcacacaagayggcggctcccagggaggaggcatga

SEQ ID NO: 1913 - DNA, 51 bp, synthetic construct
  misc_feature 1..51: note = Synthetic polynucleotide
  source 1..51: mol_type = other DNA
ggagccgagctggtcgactcggtccyggatgtggtgaggaaggagtcagag

SEQ ID NO: 1914 - DNA, 51 bp, synthetic construct
  misc_feature 1..51: note = Synthetic polynucleotide
  source 1..51: mol_type = other DNA
gtggctggcgtcagaaacaggctgcycaaggtgactcttgttcccttcttg

SEQ ID NO: 1915 - DNA, 51 bp, synthetic construct
  misc_feature 1..51: note = Synthetic polynucleotide
  source 1..51: mol_type = other DNA
ttgaacttgagaacattcctccggcytcaaccccacagcaatgggaaagtg

SEQ ID NO: 1916 - DNA, 51 bp, synthetic construct
  misc_feature 1..51: note = Synthetic polynucleotide
  source 1..51: mol_type = other DNA
gtggcatcacactcctcaagccaggyatcccgggggtaggtgggccaggct

SEQ ID NO: 1917 - DNA, 51 bp, synthetic construct
  misc_feature 1..51: note = Synthetic polynucleotide
  source 1..51: mol_type = other DNA
aagcaggccctgaccagctgtggctytgactgcttggaaaccagcatcggt

SEQ ID NO: 1918 - DNA, 51 bp, synthetic construct
  misc_feature 1..51: note = Synthetic polynucleotide
  source 1..51: mol_type = other DNA
acagcagctgacatggaggcccgccyggcgtgcggcctggtaaagggccac

SEQ ID NO: 1919 - DNA, 51 bp, synthetic construct
  misc_feature 1..51: note = Synthetic polynucleotide
  source 1..51: mol_type = other DNA
gccgtcttccagctggtctacaattyctacctgtccggggtgctgctggtg

SEQ ID NO: 1920 - DNA, 51 bp, synthetic construct
  misc_feature 1..51: note = Synthetic polynucleotide
  source 1..51: mol_type = other DNA
atgatcctctacgacatccctgatayccgtctcttctggtgtgaggacgag

SEQ ID NO: 1921 - DNA, 51 bp, synthetic construct
  misc_feature 1..51: note = Synthetic polynucleotide
  source 1..51: mol_type = other DNA
gcctgcgctttctgcagcggaacggygcgcggacccgggcgggagagggcg

SEQ ID NO: 1922 - DNA, 51 bp, synthetic construct
  misc_feature 1..51: note = Synthetic polynucleotide
  source 1..51: mol_type = other DNA
tatgaggaactcccaggcactgataycaggtgagagccagggtccgggcag

SEQ ID NO: 1923 - DNA, 51 bp, synthetic construct
  misc_feature 1..51: note = Synthetic polynucleotide
  source 1..51: mol_type = other DNA
tgcagggaaggtcattaaaggttggygatgaaacatgacccactttccttg

SEQ ID NO: 1924 - DNA, 51 bp, synthetic construct
  misc_feature 1..51: note = Synthetic polynucleotide
  source 1..51: mol_type = other DNA
ttcacacttctagtaagcctctaccygcacgacaacacataatgacccacc

SEQ ID NO: 1925 - DNA, 51 bp, synthetic construct
  misc_feature 1..51: note = Synthetic polynucleotide
  source 1..51: mol_type = other DNA
gtagttgatgctgatgtaacagttayaggttctggtcctggaggatatgtt

SEQ ID NO: 1926 - DNA, 51 bp, synthetic construct
  misc_feature 1..51: note = Synthetic polynucleotide
  source 1..51: mol_type = other DNA
agaggagactctcaccactagcgtcyggattggaatcgtgagtcaaatctg

SEQ ID NO: 1927 - DNA, 51 bp, synthetic construct
  misc_feature 1..51: note = Synthetic polynucleotide
  source 1..51: mol_type = other DNA
tgccattacagtgctctacttcctcbctcggagaattccccttcctagaag

SEQ ID NO: 1928 - DNA, 51 bp, synthetic construct
  misc_feature 1..51: note = Synthetic polynucleotide
  source 1..51: mol_type = other DNA
ggacaaagaattggatctggatcatytggaacagtctacaagggaaagtgg

SEQ ID NO: 1929 - DNA, 51 bp, synthetic construct
  misc_feature 1..51: note = Synthetic polynucleotide
  source 1..51: mol_type = other DNA
ttaggtgatgtggcagtgaaaatgtygaatgtgacagcacctacacctcag

SEQ ID NO: 1930 - DNA, 51 bp, synthetic construct
  misc_feature 1..51: note = Synthetic polynucleotide
  source 1..51: mol_type = other DNA
gattgagccctgtggacacctcatgygcacatcctgtcttacatcctggca

SEQ ID NO: 1931 - DNA, 51 bp, synthetic construct
  misc_feature 1..51: note = Synthetic polynucleotide
  source 1..51: mol_type = other DNA
ctatgacctgtatggaggggagaaabttgccactttggctgagttggtcca

SEQ ID NO: 1932 - DNA, 51 bp, synthetic construct
  misc_feature 1..51: note = Synthetic polynucleotide
  source 1..51: mol_type = other DNA
aaatagatataaaaacatcctgcccbgtaagtatcaatattccgctcagta

SEQ ID NO: 1933 - DNA, 51 bp, synthetic construct
  misc_feature 1..51: note = Synthetic polynucleotide
  source 1..51: mol_type = other DNA
aggttccctctcccagaggcagaggycgacatccacacctaatgtccacat

SEQ ID NO: 1934 - DNA, 51 bp, synthetic construct
  misc_feature 1..51: note = Synthetic polynucleotide
  source 1..51: mol_type = other DNA
agtccttaacaagcattgagatatayttctccatgaaggcttaacagtgaa

SEQ ID NO: 1935 - DNA, 51 bp, synthetic construct
  misc_feature 1..51: note = Synthetic polynucleotide
  source 1..51: mol_type = other DNA
ggccatatagaagatacagtagaaabgacagatgaaggcagtccccatcca

SEQ ID NO: 1936 - DNA, 51 bp, synthetic construct
  misc_feature 1..51: note = Synthetic polynucleotide
  source 1..51: mol_type = other DNA
atatctttacagtaccggagtacacyggaaaggatgcttgatgtaacaatg

SEQ ID NO: 1937 - DNA, 51 bp, synthetic construct
  misc_feature 1..51: note = Synthetic polynucleotide
  source 1..51: mol_type = other DNA
tcggcactgggtagagcaccacttcyatgattttgaaagagatgcatatct

SEQ ID NO: 1938 - DNA, 51 bp, synthetic construct
  misc_feature 1..51: note = Synthetic polynucleotide
  source 1..51: mol_type = other DNA
caactctccgtacatcgtgggcttcyatggtgcgttctacagcgatggcga

SEQ ID NO: 1939 - DNA, 51 bp, synthetic construct
  misc_feature 1..51: note = Synthetic polynucleotide
  source 1..51: mol_type = other DNA
tttcaagccaaccccatggcctccaygactttttcaaaaaggtattagaaa

SEQ ID NO: 1940 - DNA, 51 bp, synthetic construct
  misc_feature 1..51: note = Synthetic polynucleotide
  source 1..51: mol_type = other DNA
gtggcttgctgctgtgggaacatccygtgccactgcttcaacaaatacagg

SEQ ID NO: 1941 - DNA, 51 bp, synthetic construct
  misc_feature 1..51: note = Synthetic polynucleotide
  source 1..51: mol_type = other DNA
gcagtgctgtccccggcccaggccaycgtggtttacaccgacagggaggtc

SEQ ID NO: 1942 - DNA, 51 bp, synthetic construct
  misc_feature 1..51: note = Synthetic polynucleotide
  source 1..51: mol_type = other DNA
ccctcattcctcatagatcttccacyatgccaagggacaaccctacattga

SEQ ID NO: 1943 - DNA, 51 bp, synthetic construct
  misc_feature 1..51: note = Synthetic polynucleotide
  source 1..51: mol_type = other DNA
cactatgccaagggacaaccctacahtgacgaggtggggaccttcaaagag

SEQ ID NO: 1944 - DNA, 51 bp, synthetic construct
  misc_feature 1..51: note = Synthetic polynucleotide
  source 1..51: mol_type = other DNA
tacctcatgttcaccatggtgcttgycaccttctccatcgtcaccagcgtg

SEQ ID NO: 1945 - DNA, 51 bp, synthetic construct
  misc_feature 1..51: note = Synthetic polynucleotide
  source 1..51: mol_type = other DNA
cggggtatactggatacactcaaggyatcggatttaggcgtatctgtgtca

SEQ ID NO: 1946 - DNA, 51 bp, synthetic construct
  misc_feature 1..51: note = Synthetic polynucleotide
  source 1..51: mol_type = other DNA
aagatgtggctatgaatattcacttyctgttttctttccagaaagtggttt

SEQ ID NO: 1947 - DNA, 51 bp, synthetic construct
  misc_feature 1..51: note = Synthetic polynucleotide
  source 1..51: mol_type = other DNA
gccccaccctgtgacaggtctcctgygtcatctggatgatgcatgcatcag

SEQ ID NO: 1948 - DNA, 51 bp, synthetic construct
  misc_feature 1..51: note = Synthetic polynucleotide
  source 1..51: mol_type = other DNA
tctggataagattggaggcttcacaygtctgtgcatgccaggtaaatgggc

SEQ ID NO: 1949 - DNA, 51 bp, synthetic construct
  misc_feature 1..51: note = Synthetic polynucleotide
  source 1..51: mol_type = other DNA
ccccgctgcccttctaggacagtgaygaagtcaggccctgagatcgtgaag

SEQ ID NO: 1950 - DNA, 51 bp, synthetic construct
  misc_feature 1..51: note = Synthetic polynucleotide
  source 1..51: mol_type = other DNA
aaagaaaaacatattgaccgagaatytgtggtgatgttttctgtggtggat

SEQ ID NO: 1951 - DNA, 51 bp, synthetic construct
  misc_feature 1..51: note = Synthetic polynucleotide
  source 1..51: mol_type = other DNA
gtgactaggatttaccattcccacabtgatgctccaaaagatattgcctca

SEQ ID NO: 1952 - DNA, 51 bp, synthetic construct
  misc_feature 1..51: note = Synthetic polynucleotide
  source 1..51: mol_type = other DNA
caggaggagtcccaggccgcccgcaygatccacagcaccaatggcctatac

SEQ ID NO: 1953 - DNA, 51 bp, synthetic construct
  misc_feature 1..51: note = Synthetic polynucleotide
  source 1..51: mol_type = other DNA
ttcgggggccttatcgtcgtctgtcytttcctgggcctttgcgatggcttc

SEQ ID NO: 1954 - DNA, 51 bp, synthetic construct
  misc_feature 1..51: note = Synthetic polynucleotide
  source 1..51: mol_type = other DNA
ccgtgggaagcatgttagacactacyacattgccgctgaggaaatcatctg

SEQ ID NO: 1955 - DNA, 51 bp, synthetic construct
  misc_feature 1..51: note = Synthetic polynucleotide
  source 1..51: mol_type = other DNA
cgggcttgtgcaccagggcatgaaahgctcctgtgagtgacctgggccttg

SEQ ID NO: 1956 - DNA, 51 bp, synthetic construct
  misc_feature 1..51: note = Synthetic polynucleotide
  source 1..51: mol_type = other DNA
gacccctgcagctgcagacatctgcytcaccaaggagctacactcccactt

SEQ ID NO: 1957 - DNA, 51 bp, synthetic construct
  misc_feature 1..51: note = Synthetic polynucleotide
  source 1..51: mol_type = other DNA
cagtctcctttgtgacaatggacaaygtagaaatactcctggaagttttgt

SEQ ID NO: 1958 - DNA, 51 bp, synthetic construct
  misc_feature 1..51: note = Synthetic polynucleotide
  source 1..51: mol_type = other DNA
ctttctggctgtagaccttgatgagygctctgagaacctgaatctctgtgg

SEQ ID NO: 1959 - DNA, 51 bp, synthetic construct
  misc_feature 1..51: note = Synthetic polynucleotide
  source 1..51: mol_type = other DNA
gtagcacggagctctttgtgaaaggygggcctgggacctgaggatgtggga

SEQ ID NO: 1960 - DNA, 51 bp, synthetic construct
  misc_feature 1..51: note = Synthetic polynucleotide
  source 1..51: mol_type = other DNA
gacgcggaagtagtagccattgccartgatgagctctggcaccacgcagtg

SEQ ID NO: 1961 - DNA, 51 bp, synthetic construct
  misc_feature 1..51: note = Synthetic polynucleotide
  source 1..51: mol_type = other DNA
cctcctatcagccttccgccgcacgygagtggccatcctcagggcctgggg

SEQ ID NO: 1962 - DNA, 51 bp, synthetic construct
  misc_feature 1..51: note = Synthetic polynucleotide
  source 1..51: mol_type = other DNA
accaagcagccacgccagtacttcayaggagtcctggacatcgctggcttc

SEQ ID NO: 1963 - DNA, 51 bp, synthetic construct
  misc_feature 1..51: note = Synthetic polynucleotide
  source 1..51: mol_type = other DNA
atgcaccagctgcgctgcaatggtgygctggagggcatccgcatctgcagg

SEQ ID NO: 1964 - DNA, 51 bp, synthetic construct
  misc_feature 1..51: note = Synthetic polynucleotide
  source 1..51: mol_type = other DNA
aagagtgcagaaagagagaaggagayggcctccatgaaggaggagttcaca

SEQ ID NO: 1965 - DNA, 51 bp, synthetic construct
  misc_feature 1..51: note = Synthetic polynucleotide
  source 1..51: mol_type = other DNA
gaaagagagaaggagatggcctccahgaaggaggagttcacacgcctcaaa

SEQ ID NO: 1966 - DNA, 51 bp, synthetic construct
  misc_feature 1..51: note = Synthetic polynucleotide
  source 1..51: mol_type = other DNA
cagtactttgctgttattgcagccaytggggaccgcagcaagaaggaccag

SEQ ID NO: 1967 - DNA, 51 bp, synthetic construct
  misc_feature 1..51: note = Synthetic polynucleotide
  source 1..51: mol_type = other DNA
acaggaaagttggcatctgcagacayagagacctgtgagtgccatgaatct

SEQ ID NO: 1968 - DNA, 51 bp, synthetic construct
  misc_feature 1..51: note = Synthetic polynucleotide
  source 1..51: mol_type = other DNA
ctcctgccccacgtgcagcgcttccygcagtcccgaaagcactgcccactc

SEQ ID NO: 1969 - DNA, 51 bp, synthetic construct
  misc_feature 1..51: note = Synthetic polynucleotide
  source 1..51: mol_type = other DNA
ggagagcctggccaagtgctgcaggyagcggccgcgcgggcctgcgtagag

SEQ ID NO: 1970 - DNA, 51 bp, synthetic construct
  misc_feature 1..51: note = Synthetic polynucleotide
  source 1..51: mol_type = other DNA
tcgctgtcctctggctcgcaggtcabggcagcgccaggcggcaggtcggag

SEQ ID NO: 1971 - DNA, 51 bp, synthetic construct
  misc_feature 1..51: note = Synthetic polynucleotide
  source 1..51: mol_type = other DNA
aatggagttctctctattatctatgyaagtgttgcttcttgctccagggat

SEQ ID NO: 1972 - DNA, 51 bp, synthetic construct
  misc_feature 1..51: note = Synthetic polynucleotide
  source 1..51: mol_type = other DNA
ctgaaagagcgatgcctccaggttgyccggagcctagtcaagcctgagaat

SEQ ID NO: 1973 - DNA, 51 bp, synthetic construct
  misc_feature 1..51: note = Synthetic polynucleotide
  source 1..51: mol_type = other DNA
agagagtgggtgtctccggaggccaygggctacccggaggtggagcgcagg

SEQ ID NO: 1974 - DNA, 51 bp, synthetic construct
  misc_feature 1..51: note = Synthetic polynucleotide
  source 1..51: mol_type = other DNA
ctgttgaagagttgagtgcagcacgyaagagtctttttttttttttttaat

SEQ ID NO: 1975 - DNA, 51 bp, synthetic construct
  misc_feature 1..51: note = Synthetic polynucleotide
  source 1..51: mol_type = other DNA
ttgcggacacttttggcgatcaaggrcagatacatccttataacaatggaa

SEQ ID NO: 1976 - DNA, 51 bp, synthetic construct
  misc_feature 1..51: note = Synthetic polynucleotide
  source 1..51: mol_type = other DNA
attgatggttgggagggaaaagacabtggacagtgttgtaatgaatttata

SEQ ID NO: 1977 - DNA, 51 bp, synthetic construct
  misc_feature 1..51: note = Synthetic polynucleotide
  source 1..51: mol_type = other DNA
gtataagaaggagctggagaagactyattctgccaaggtgcttgctctcga

SEQ ID NO: 1978 - DNA, 51 bp, synthetic construct
  misc_feature 1..51: note = Synthetic polynucleotide
  source 1..51: mol_type = other DNA
tcttgaagatacaattgtcttaaacyggagaaaacctatacaatcaaatgg

SEQ ID NO: 1979 - DNA, 51 bp, synthetic construct
  misc_feature 1..51: note = Synthetic polynucleotide
  source 1..51: mol_type = other DNA
cgacacaacaagccagccatatagaygcctctgctcccaggagagcttcac

SEQ ID NO: 1980 - DNA, 51 bp, synthetic construct
  misc_feature 1..51: note = Synthetic polynucleotide
  source 1..51: mol_type = other DNA
gtcgaggacgtacaacaggagcaggyaaatacttatcttcaaatgcatatg

SEQ ID NO: 1981 - DNA, 51 bp, synthetic construct
  misc_feature 1..51: note = Synthetic polynucleotide
  source 1..51: mol_type = other DNA
ctgggctgtacaaacatggtatgacyctcttggagcaataaacaaaataca

SEQ ID NO: 1982 - DNA, 51 bp, synthetic construct
  misc_feature 1..51: note = Synthetic polynucleotide
  source 1..51: mol_type = other DNA
cccttcgtggcccgccagatggcccygcacgcaaatgtgagtgggggtggg

SEQ ID NO: 1983 - DNA, 51 bp, synthetic construct
  misc_feature 1..51: note = Synthetic polynucleotide
  source 1..51: mol_type = other DNA
cctcatccaccgctgtgccagccagygcgtcgtggccttgtccatctgcag

SEQ ID NO: 1984 - DNA, 51 bp, synthetic construct
  misc_feature 1..51: note = Synthetic polynucleotide
  source 1..51: mol_type = other DNA
ggacatgatggctcgatacgtcttcyccaacttcacggctgtcccgaagag

SEQ ID NO: 1985 - DNA, 51 bp, synthetic construct
  misc_feature 1..51: note = Synthetic polynucleotide
  source 1..51: mol_type = other DNA
gccgccctgctcatctggaaactccycatcaccatccacgaccgaaaagaa

SEQ ID NO: 1986 - DNA, 51 bp, synthetic construct
  misc_feature 1..51: note = Synthetic polynucleotide
  source 1..51: mol_type = other DNA
agatgatctgggatggaattgtaggyaagagaaaaggtgtctgctgttgtt

SEQ ID NO: 1987 - DNA, 51 bp, synthetic construct
  misc_feature 1..51: note = Synthetic polynucleotide
  source 1..51: mol_type = other DNA
ccttttagcttgtagtgaacaggacyctgagccaggggcccggcttacctg

SEQ ID NO: 1988 - DNA, 51 bp, synthetic construct
  misc_feature 1..51: note = Synthetic polynucleotide
  source 1..51: mol_type = other DNA
ctagccctccatacctgggagcagayggggctgaggtcactgtgcgcccaa

SEQ ID NO: 1989 - DNA, 51 bp, synthetic construct
  misc_feature 1..51: note = Synthetic polynucleotide
  source 1..51: mol_type = other DNA
atgcctatatgaacttttctggttcyaatggatgtctgctgggctctttta

SEQ ID NO: 1990 - DNA, 51 bp, synthetic construct
  misc_feature 1..51: note = Synthetic polynucleotide
  source 1..51: mol_type = other DNA
gcgtggcagggcctgggcgaggtgcygcaggcccagggccagaacgaggct

SEQ ID NO: 1991 - DNA, 51 bp, synthetic construct
  misc_feature 1..51: note = Synthetic polynucleotide
  source 1..51: mol_type = other DNA
tacagctatgatttgtcccactcacytcaatataatctcactgtcttgcga

SEQ ID NO: 1992 - DNA, 51 bp, synthetic construct
  misc_feature 1..51: note = Synthetic polynucleotide
  source 1..51: mol_type = other DNA
attggaggaatatcgtaggtaaaaabgcctattggatccaaagagaggcca

SEQ ID NO: 1993 - DNA, 51 bp, synthetic construct
  misc_feature 1..51: note = Synthetic polynucleotide
  source 1..51: mol_type = other DNA
tagataaattcaaattagacttaggyaagtaatgcaatatggtagactggg

SEQ ID NO: 1994 - DNA, 51 bp, synthetic construct
  misc_feature 1..51: note = Synthetic polynucleotide
  source 1..51: mol_type = other DNA
ttaagacacgctgcaacaaagcagghattgacaaattttatataactttat

SEQ ID NO: 1995 - DNA, 51 bp, synthetic construct
  misc_feature 1..51: note = Synthetic polynucleotide
  source 1..51: mol_type = other DNA
agatgcctaagcccagaaagggtgcytcttcaactaaaatacaggcaagtt

SEQ ID NO: 1996 - DNA, 51 bp, synthetic construct
  misc_feature 1..51: note = Synthetic polynucleotide
  source 1..51: mol_type = other DNA
tgcttctctgtctttgccatctccthctttgcgctcccagcggtaggtgcc

SEQ ID NO: 1997 - DNA, 51 bp, synthetic construct
  misc_feature 1..51: note = Synthetic polynucleotide
  source 1..51: mol_type = other DNA
cttctctccaggctggaccagtccabtgggaagccctcactgttcatctcc

SEQ ID NO: 1998 - DNA, 51 bp, synthetic construct
  misc_feature 1..51: note = Synthetic polynucleotide
  source 1..51: mol_type = other DNA
ggctgccgcagcaagtacgtgggccyctgggggcggctgcgctttgcccgg

SEQ ID NO: 1999 - DNA, 51 bp, synthetic construct
  misc_feature 1..51: note = Synthetic polynucleotide
  source 1..51: mol_type = other DNA
cctccggaaaatattcaccaccatcycattctgcattgttctgcgcatggc

SEQ ID NO: 2000 - DNA, 51 bp, synthetic construct
  misc_feature 1..51: note = Synthetic polynucleotide
  source 1..51: mol_type = other DNA
ttaaagaaagctgacaaaatattaaytttgcatgaaggtagcagctatttt

SEQ ID NO: 2001 - DNA, 51 bp, synthetic construct
  misc_feature 1..51: note = Synthetic polynucleotide
  source 1..51: mol_type = other DNA
tacgtgggagtagccgacactttgcytgctatgggattcttcagaggtcta

SEQ ID NO: 2002 - DNA, 51 bp, synthetic construct
  misc_feature 1..51: note = Synthetic polynucleotide
  source 1..51: mol_type = other DNA
ggacggcagccttactttgaaactcygttccacaaagctctgaatttacat

SEQ ID NO: 2003 - DNA, 51 bp, synthetic construct
  misc_feature 1..51: note = Synthetic polynucleotide
  misc_difference 26: note = n is a, c, g, t or u
  source 1..51: mol_type = other DNA
gatcaaggaacctgtctccacaaagngtgaccacatattttgcaagtaagt

SEQ ID NO: 2004 - DNA, 51 bp, synthetic construct
  misc_feature 1..51: note = Synthetic polynucleotide
  source 1..51: mol_type = other DNA
gaaagggccttcacagtgtcctttabgtaagaatgatataaccaaaaggta

SEQ ID NO: 2005 - DNA, 51 bp, synthetic construct
  misc_feature 1..51: note = Synthetic polynucleotide
  source 1..51: mol_type = other DNA
atgtaagaatgatataaccaaaaggyatataatttggtaatgatgctaggt

SEQ ID NO: 2006 - DNA, 51 bp, synthetic construct
  misc_feature 1..51: note = Synthetic polynucleotide
  source 1..51: mol_type = other DNA
taaagttcattggaacagaaagaaabggatttatctgctcttcgcgttgaa

SEQ ID NO: 2007 - DNA, 51 bp, synthetic construct
  misc_feature 1..51: note = Synthetic polynucleotide
  source 1..51: mol_type = other DNA
cagaacaaagcacatcagaaaaaggbgtgtattgttggccaaacactgata

SEQ ID NO: 2008 - DNA, 51 bp, synthetic construct
  misc_feature 1..51: note = Synthetic polynucleotide
  source 1..51: mol_type = other DNA
ctcttcttccagatcttcagggggcyagaaatctgttgctatgggcccttc

SEQ ID NO: 2009 - DNA, 51 bp, synthetic construct
  misc_feature 1..51: note = Synthetic polynucleotide
  source 1..51: mol_type = other DNA
gtcattaatgctatgcagaaaatctyagagtgtcccatctggtaagtcagc

SEQ ID NO: 2010 - DNA, 51 bp, synthetic construct
  misc_feature 1..51: note = Synthetic polynucleotide
  source 1..51: mol_type = other DNA
atgcttgctatacagactgctatacyggacattttaaatgcatgtctaaag

SEQ ID NO: 2011 - DNA, 51 bp, synthetic construct
  misc_feature 1..51: note = Synthetic polynucleotide
  source 1..51: mol_type = other DNA
tgctatactggacattttaaatgcaygtctaaaggaactaaaatgccataa

SEQ ID NO: 2012 - DNA, 51 bp, synthetic construct
  misc_feature 1..51: note = Synthetic polynucleotide
  source 1..51: mol_type = other DNA
ggcgtgctggtgctcacagtgctgcygccgccagaggagctactgcgttcc

SEQ ID NO: 2013 - DNA, 51 bp, synthetic construct
  misc_feature 1..51: note = Synthetic polynucleotide
  source 1..51: mol_type = other DNA
ggaaattttctcaagtggcaaacttyagaaggaggtgttttacaggtaagc

SEQ ID NO: 2014 - DNA, 51 bp, synthetic construct
  misc_feature 1..51: note = Synthetic polynucleotide
  source 1..51: mol_type = other DNA
gtctaaaaaagcagaaagtccagagyatgtccatatgtatactcaaagaag

SEQ ID NO: 2015 - DNA, 51 bp, synthetic construct
  misc_feature 1..51: note = Synthetic polynucleotide
  source 1..51: mol_type = other DNA
gcgcttctcacactcgggctcgtacycgcagcacatgaatcacaggtattc

SEQ ID NO: 2016 - DNA, 51 bp, synthetic construct
  misc_feature 1..51: note = Synthetic polynucleotide
  source 1..51: mol_type = other DNA
cccctctgctacttcgcccgggtctytgacgtcttcctggtggagggctac

SEQ ID NO: 2017 - DNA, 51 bp, synthetic construct
  misc_feature 1..51: note = Synthetic polynucleotide
  source 1..51: mol_type = other DNA
gtgggagccctgaaggagaagtaccygcggccgtccccgctgctcttccac

SEQ ID NO: 2018 - DNA, 51 bp, synthetic construct
  misc_feature 1..51: note = Synthetic polynucleotide
  source 1..51: mol_type = other DNA
agcttctgggggaaagctcatcttcyatgatcttcgaggagagggggtgaa

SEQ ID NO: 2019 - DNA, 51 bp, synthetic construct
  misc_feature 1..51: note = Synthetic polynucleotide
  source 1..51: mol_type = other DNA
ctcatcttctcccacctgcacgagcyctcactgcgctggcacctggggcgc

SEQ ID NO: 2020 - DNA, 51 bp, synthetic construct
  misc_feature 1..51: note = Synthetic polynucleotide
  source 1..51: mol_type = other DNA
cccctgttttctgcacaccccaagcycttcgagagaacctgtcgccagtat

SEQ ID NO: 2021 - DNA, 51 bp, synthetic construct
  misc_feature 1..51: note = Synthetic polynucleotide
  source 1..51: mol_type = other DNA
cgggcccctctcagcaggctgtgtgygccagggctgtggggcagaggacgt

SEQ ID NO: 2022 - DNA, 51 bp, synthetic construct
  misc_feature 1..51: note = Synthetic polynucleotide
  source 1..51: mol_type = other DNA
atcacccacattgccatccaggcctygagagaggagtgtctctccaggtga

SEQ ID NO: 2023 - DNA, 51 bp, synthetic construct
  misc_feature 1..51: note = Synthetic polynucleotide
  source 1..51: mol_type = other DNA
ctaccatctctccccgcaggaatccygtactatgtctacatggggctgctg

SEQ ID NO: 2024 - DNA, 51 bp, synthetic construct
  misc_feature 1..51: note = Synthetic polynucleotide
  source 1..51: mol_type = other DNA
ccataaaattcttcttagtagctatyaccttcttattatttgatctagaaa

SEQ ID NO: 2025 - DNA, 51 bp, synthetic construct
  misc_feature 1..51: note = Synthetic polynucleotide
  source 1..51: mol_type = other DNA
tcccttcccctactcatcgcactaayttacactcacaacaccctaggctca

SEQ ID NO: 2026 - DNA, 51 bp, synthetic construct
  misc_feature 1..51: note = Synthetic polynucleotide
  source 1..51: mol_type = other DNA
atccttcttgctcatcagttgatgayacgcccgagcagatgccaacacagc

SEQ ID NO: 2027 - DNA, 51 bp, synthetic construct
  misc_feature 1..51: note = Synthetic polynucleotide
  source 1..51: mol_type = other DNA
attcagcttcctacactattaaagtytaccacaaccaccaccccatcatac

SEQ ID NO: 2028 - DNA, 51 bp, synthetic construct
  misc_feature 1..51: note = Synthetic polynucleotide
  misc_difference 26: note = n is a, c, g, t or u
  source 1..51: mol_type = other DNA
acccagcagtgggggctcgcggacgngaagggccactggtccccaacaatg

SEQ ID NO: 2029 - DNA, 51 bp, synthetic construct
  misc_feature 1..51: note = Synthetic polynucleotide
  source 1..51: mol_type = other DNA
gtagccaagaagattgctgctgtacytacggtaaatgtatattttaactgt

SEQ ID NO: 2030 - DNA, 51 bp, synthetic construct
  misc_feature 1..51: note = Synthetic polynucleotide
  source 1..51: mol_type = other DNA
tgagtttttgtctcttcccagtttcyctgagaaggtaaggcctgttgtgac

SEQ ID NO: 2031 - DNA, 51 bp, synthetic construct
  misc_feature 1..51: note = Synthetic polynucleotide
  source 1..51: mol_type = other DNA
tctggcaccattcagagatacagtcyacctaatgttggtttgattcaaaaa

SEQ ID NO: 2032 - DNA, 51 bp, synthetic construct
  misc_feature 1..51: note = Synthetic polynucleotide
  source 1..51: mol_type = other DNA
gcagatgcgccgatcgtggcccaccyttgggaggtgagttttcacactttt

SEQ ID NO: 2033 - DNA, 51 bp, synthetic construct
  misc_feature 1..51: note = Synthetic polynucleotide
  source 1..51: mol_type = other DNA
gacgaagattcaccttatcaaaatayaaaaattctacactcgaagcagttt

SEQ ID NO: 2034 - DNA, 51 bp, synthetic construct
  misc_feature 1..51: note = Synthetic polynucleotide
  source 1..51: mol_type = other DNA
aagtggatggccccagagagcatctytgactgtgtctacacggttcagagc

SEQ ID NO: 2035 - DNA, 51 bp, synthetic construct
  misc_feature 1..51: note = Synthetic polynucleotide
  source 1..51: mol_type = other DNA
tccttcctccaacccttccaggagcygcgtgagaccaagcgccgtcatgag

SEQ ID NO: 2036 - DNA, 51 bp, synthetic construct
  misc_feature 1..51: note = Synthetic polynucleotide
  source 1..51: mol_type = other DNA
ccaccctccaacctctcccaggtgcygttctggggcctacgggacctaaag

SEQ ID NO: 2037 - DNA, 51 bp, synthetic construct
  misc_feature 1..51: note = Synthetic polynucleotide
  source 1..51: mol_type = other DNA
tacagggtggtcttcgacatcacctycttcttcttcgtcatcgtcatcctg

SEQ ID NO: 2038 - DNA, 51 bp, synthetic construct
  misc_feature 1..51: note = Synthetic polynucleotide
  source 1..51: mol_type = other DNA
gccggcaagggtgaggccctgcggayccgcgccatcctccgctcccttgtg

SEQ ID NO: 2039 - DNA, 51 bp, synthetic construct
  misc_feature 1..51: note = Synthetic polynucleotide
  source 1..51: mol_type = other DNA
gaagtgtcagccgtgctctactaccyggaccaggtgggtggggccggaggg

SEQ ID NO: 2040 - DNA, 51 bp, synthetic construct
  misc_feature 1..51: note = Synthetic polynucleotide
  source 1..51: mol_type = other DNA
ttttacaccctgcggttccttgcccycttcttggcatttgccatcaacttc

SEQ ID NO: 2041 - DNA, 51 bp, synthetic construct
  misc_feature 1..51: note = Synthetic polynucleotide
  source 1..51: mol_type = other DNA
cccgccctgcggtgtctgagcctccygcatacactggtggcctttctctgc

SEQ ID NO: 2042 - DNA, 51 bp, synthetic construct
  misc_feature 1..51: note = Synthetic polynucleotide
  source 1..51: mol_type = other DNA
gtgtgcccacagtccttcctgtaccygggctggtatatggtgatgtccctc

SEQ ID NO: 2043 - DNA, 51 bp, synthetic construct
  misc_feature 1..51: note = Synthetic polynucleotide
  source 1..51: mol_type = other DNA
ctcagggcttagcagcaggttgtacrgggcgatccacacttgcccgtccaa

SEQ ID NO: 2044 - DNA, 51 bp, synthetic construct
  misc_feature 1..51: note = Synthetic polynucleotide
  source 1..51: mol_type = other DNA
aaaatacctcgaagcaatcaaaataytttctggtccattgaaaggaataga

SEQ ID NO: 2045 - DNA, 51 bp, synthetic construct
  misc_feature 1..51: note = Synthetic polynucleotide
  source 1..51: mol_type = other DNA
cctgcgggtcaccatcctcacgtacygtacaaaaggacagcagaggagaag

SEQ ID NO: 2046 - DNA, 51 bp, synthetic construct
  misc_feature 1..51: note = Synthetic polynucleotide
  source 1..51: mol_type = other DNA
tccccagaaaagatggaaaagaaatygcatgcagtgccggctgccaagaca

SEQ ID NO: 2047 - DNA, 51 bp, synthetic construct
  misc_feature 1..51: note = Synthetic polynucleotide
  source 1..51: mol_type = other DNA
ccatattatcgtcattatactggtgyactgtttcccattgctcatcatggg

SEQ ID NO: 2048 - DNA, 51 bp, synthetic construct
  misc_feature 1..51: note = Synthetic polynucleotide
  source 1..51: mol_type = other DNA
taccaggacctgctcaatgtcaagchggccctggacatcgagatcgccacc

SEQ ID NO: 2049 - DNA, 51 bp, synthetic construct
  misc_feature 1..51: note = Synthetic polynucleotide
  source 1..51: mol_type = other DNA
gacctgctcaatgtcaagctggcccyggacatcgagatcgccacctacagg

SEQ ID NO: 2050 - DNA, 51 bp, synthetic construct
  misc_feature 1..51: note = Synthetic polynucleotide
  source 1..51: mol_type = other DNA
ggccctggacatcgagatcgccaccyacaggaagctgctagagggcgagga

SEQ ID NO: 2051 - DNA, 51 bp, synthetic construct
  misc_feature 1..51: note = Synthetic polynucleotide
  source 1..51: mol_type = other DNA
cgggccagtgagcgggcagagatgayggagctcaatgaccgctttgccagc

SEQ ID NO: 2052 - DNA, 51 bp, synthetic construct
  misc_feature 1..51: note = Synthetic polynucleotide
  source 1..51: mol_type = other DNA
ggagctcaatgaccgctttgccagcyacatcgagaaggttcgcttcctgga

SEQ ID NO: 2053 - DNA, 51 bp, synthetic construct
  misc_feature 1..51: note = Synthetic polynucleotide
  source 1..51: mol_type = other DNA
agctacatcgagaaggttcgcttccyggaacagcaaaacaaggcgctggct

SEQ ID NO: 2054 - DNA, 51 bp, synthetic construct
  misc_feature 1..51: note = Synthetic polynucleotide
  source 1..51: mol_type = other DNA
ttcctggaacagcaaaacaaggcgcyggctgctgagctgaaccagctgcgg

SEQ ID NO: 2055 - DNA, 51 bp, synthetic construct
  misc_feature 1..51: note = Synthetic polynucleotide
  source 1..51: mol_type = other DNA
caaaacaaggcgctggctgctgagcygaaccagctgcgggccaaggagccc

SEQ ID NO: 2056 - DNA, 51 bp, synthetic construct
  misc_feature 1..51: note = Synthetic polynucleotide
  source 1..51: mol_type = other DNA
gccaagccagacctcaccgcagcccygaaagagatccgcacgcagtatgag

SEQ ID NO: 2057 - DNA, 51 bp, synthetic construct
  misc_feature 1..51: note = Synthetic polynucleotide
  source 1..51: mol_type = other DNA
ccgcacgcagtatgaggcaatggcgyccagcaacatgcatgaagccgaaga

SEQ ID NO: 2058 - DNA, 51 bp, synthetic construct
  misc_feature 1..51: note = Synthetic polynucleotide
  source 1..51: mol_type = other DNA
agttatcaggaggcgctggcgcggcyggaggaagaggggcagagcctcaag

SEQ ID NO: 2059 - DNA, 51 bp, synthetic construct
  misc_feature 1..51: note = Synthetic polynucleotide
  source 1..51: mol_type = other DNA
gagatcgccacctaccgcaagctgcbggagggtgaggagtgcaggtgggta

SEQ ID NO: 2060 - DNA, 51 bp, synthetic construct
  misc_feature 1..51: note = Synthetic polynucleotide
  source 1..51: mol_type = other DNA
cagatcaagaccctcaacaacaagtbtgcctccttcatcgacaaggtgagc

SEQ ID NO: 2061 - DNA, 51 bp, synthetic construct
  misc_feature 1..51: note = Synthetic polynucleotide
  source 1..51: mol_type = other DNA
aatgagaagatcaccatgcagaaccycaacgaccgcctggcttcctacctg

SEQ ID NO: 2062 - DNA, 51 bp, synthetic construct
  misc_feature 1..51: note = Synthetic polynucleotide
  source 1..51: mol_type = other DNA
ccatgtccccaccaggaagtggccaygcgcaagctggtgcgctcagtgact

SEQ ID NO: 2063 - DNA, 51 bp, synthetic construct
  misc_feature 1..51: note = Synthetic polynucleotide
  source 1..51: mol_type = other DNA
tccccctgcccgacctcagaccgcabggaggtgctatgctgccgagaaccc

SEQ ID NO: 2064 - DNA, 51 bp, synthetic construct
  misc_feature 1..51: note = Synthetic polynucleotide
  source 1..51: mol_type = other DNA
ctggtccgccggctgccgcagcaagbacgtgggcctctgggggcggctgcg

SEQ ID NO: 2065 - DNA, 51 bp, synthetic construct
  misc_feature 1..51: note = Synthetic polynucleotide
  source 1..51: mol_type = other DNA
gaccgccagggaggcacctggaggchcctgggctccgtggtcttcatccac

SEQ ID NO: 2066 - DNA, 51 bp, synthetic construct
  misc_feature 1..51: note = Synthetic polynucleotide
  source 1..51: mol_type = other DNA
aacgctcgggtggagaactgcgccgbcatctactgcaacgacggcttctgc

SEQ ID NO: 2067 - DNA, 51 bp, synthetic construct
  misc_feature 1..51: note = Synthetic polynucleotide
  source 1..51: mol_type = other DNA
gagtacggcgcggccgtgctgttctygctcatgtgcacctttgcgctcatc

SEQ ID NO: 2068 - DNA, 51 bp, synthetic construct
  misc_feature 1..51: note = Synthetic polynucleotide
  misc_difference 26: note = n is a, c, g, t or u
  source 1..51: mol_type = other DNA
tggctgcacaacctgggcgaccaganaggcaaaccctacaacagcagcggc

SEQ ID NO: 2069 - DNA, 51 bp, synthetic construct
  misc_feature 1..51: note = Synthetic polynucleotide
  source 1..51: mol_type = other DNA
cttcagcagcctcaccagtgtgggchtcggcaacgtctctcccaacaccaa

SEQ ID NO: 2070 - DNA, 51 bp, synthetic construct
  misc_feature 1..51: note = Synthetic polynucleotide
  source 1..51: mol_type = other DNA
tggcctccagggaagaatgacatctbtggggagcctctgaacctgtatgca

SEQ ID NO: 2071 - DNA, 51 bp, synthetic construct
  misc_feature 1..51: note = Synthetic polynucleotide
  source 1..51: mol_type = other DNA
gctgccgcgcagatcgcgcaggcacbgctgggcgccgaggagcgcaaagtg

SEQ ID NO: 2072 - DNA, 51 bp, synthetic construct
  misc_feature 1..51: note = Synthetic polynucleotide
  source 1..51: mol_type = other DNA
aagaacgaggatggggctgtcatcabgttcatcctcaatttcgaggtggtg

SEQ ID NO: 2073 - DNA, 51 bp, synthetic construct
  misc_feature 1..51: note = Synthetic polynucleotide
  source 1..51: mol_type = other DNA
gcccccctaggccgtaagttcatcabcgccaacgctcgggtggagaactgc

SEQ ID NO: 2074 - DNA, 51 bp, synthetic construct
  misc_feature 1..51: note = Synthetic polynucleotide
  source 1..51: mol_type = other DNA
caagcggaccacctgggatttctgcygtggtctcctgcggcagcggcctca

SEQ ID NO: 2075 - DNA, 51 bp, synthetic construct
  misc_feature 1..51: note = Synthetic polynucleotide
  source 1..51: mol_type = other DNA
tgccgcccagggccagctgcccagcygcattgccaccccctactccccgcc

SEQ ID NO: 2076 - DNA, 51 bp, synthetic construct
  misc_feature 1..51: note = Synthetic polynucleotide
  source 1..51: mol_type = other DNA
ttgtctgcaggccttcgaggacatcyacctagaggagcggaagaccatcaa

SEQ ID NO: 2077 - DNA, 51 bp, synthetic construct
  misc_feature 1..51: note = Synthetic polynucleotide
  source 1..51: mol_type = other DNA
tgccgacaagatgttcacatatgtcytcgtgctggagatgctgctcaagtg

SEQ ID NO: 2078 - DNA, 51 bp, synthetic construct
  misc_feature 1..51: note = Synthetic polynucleotide
  source 1..51: mol_type = other DNA
tttattggtgtcatcattgacaactbcaaccaacagaagaaaaagatacgt

SEQ ID NO: 2079 - DNA, 51 bp, synthetic construct
  misc_feature 1..51: note = Synthetic polynucleotide
  source 1..51: mol_type = other DNA
cgcacgctgctctttgccctcatgabgtccctgcctgccctcttcaacatc

SEQ ID NO: 2080 - DNA, 51 bp, synthetic construct
  misc_feature 1..51: note = Synthetic polynucleotide
  source 1..51: mol_type = other DNA
tttgccgatgccctgtctgagccacyccgtatcgccaagcccaaccagata

SEQ ID NO: 2081 - DNA, 51 bp, synthetic construct
  misc_feature 1..51: note = Synthetic polynucleotide
  source 1..51: mol_type = other DNA
gagatggacgccctgaagatccagahggaggagaagttcatggcagccaac

SEQ ID NO: 2082 - DNA, 51 bp, synthetic construct
  misc_feature 1..51: note = Synthetic polynucleotide
  source 1..51: mol_type = other DNA
agatacacaactgaatttgtggacchgggcaatgtctcagccttacgcacc

SEQ ID NO: 2083 - DNA, 51 bp, synthetic construct
  misc_feature 1..51: note = Synthetic polynucleotide
  source 1..51: mol_type = other DNA
ttacacagagaaggccaagctattayttttgtcattgatagtagtgataga

SEQ ID NO: 2084 - DNA, 51 bp, synthetic construct
  misc_feature 1..51: note = Synthetic polynucleotide
  source 1..51: mol_type = other DNA
tcccgaggcggctgctccggtctctygcggtgtggaaagggaacgacctac

SEQ ID NO: 2085 - DNA, 51 bp, synthetic construct
  misc_feature 1..51: note = Synthetic polynucleotide
  source 1..51: mol_type = other DNA
gaattaattacagggctcgtccaacyggtccctcagtcacacatgccagag

SEQ ID NO: 2086 - DNA, 51 bp, synthetic construct
  misc_feature 1..51: note = Synthetic polynucleotide
  source 1..51: mol_type = other DNA
cttcagaaaagagtgatggcactgcbgaggcgcattgagcatcccactgca

SEQ ID NO: 2087 - DNA, 51 bp, synthetic construct
  misc_feature 1..51: note = Synthetic polynucleotide
  source 1..51: mol_type = other DNA
cctcaccagaatcacccaggacattytccagcagttgctgaaacgaggttt

SEQ ID NO: 2088 - DNA, 51 bp, synthetic construct
  misc_feature 1..51: note = Synthetic polynucleotide
  source 1..51: mol_type = other DNA
ttctatgtctggtttgatgccactaytggctatctgtccatcacagccaac

SEQ ID NO: 2089 - DNA, 51 bp, synthetic construct
  misc_feature 1..51: note = Synthetic polynucleotide
  source 1..51: mol_type = other DNA
gttcattgtgctatttactggagagygtgtactgaaactcatctctctacg

SEQ ID NO: 2090 - DNA, 51 bp, synthetic construct
  misc_feature 1..51: note = Synthetic polynucleotide
  source 1..51: mol_type = other DNA
tgagacctttggcaacagcatgatcygcctattccaaattacaacctctgc

SEQ ID NO: 2091 - DNA, 51 bp, synthetic construct
  misc_feature 1..51: note = Synthetic polynucleotide
  source 1..51: mol_type = other DNA
caacctgaggaataaatgtatacaayggcctcccaccaatgcttccttgga

SEQ ID NO: 2092 - DNA, 51 bp, synthetic construct
  misc_feature 1..51: note = Synthetic polynucleotide
  source 1..51: mol_type = other DNA
tgttgtgttcctgtcttacagacttytatagtattgaataaagggaaggcc

SEQ ID NO: 2093 - DNA, 51 bp, synthetic construct
  misc_feature 1..51: note = Synthetic polynucleotide
  source 1..51: mol_type = other DNA
tgtgttcctgtcttacagacttttayagtattgaataaagggaaggccatc

SEQ ID NO: 2094 - DNA, 51 bp, synthetic construct
  misc_feature 1..51: note = Synthetic polynucleotide
  source 1..51: mol_type = other DNA
tatttcaccaatgcctggtgttggcyggacttcttaattgttgatgtaggt

SEQ ID NO: 2095 - DNA, 51 bp, synthetic construct
  misc_feature 1..51: note = Synthetic polynucleotide
  source 1..51: mol_type = other DNA
ccaaacaaactccagctcattgccayggatttgcccatggtgagtggtgac

SEQ ID NO: 2096 - DNA, 51 bp, synthetic construct
  misc_feature 1..51: note = Synthetic polynucleotide
  source 1..51: mol_type = other DNA
agattttactttccttcgggatccayggaactggctcgatttcactgtcat

SEQ ID NO: 2097 - DNA, 51 bp, synthetic construct
  misc_feature 1..51: note = Synthetic polynucleotide
  source 1..51: mol_type = other DNA
atagaccgcaccaacgccaacttccyggtgtggccgccctgtgtggaggtg

SEQ ID NO: 2098 - DNA, 51 bp, synthetic construct
  misc_feature 1..51: note = Synthetic polynucleotide
  source 1..51: mol_type = other DNA
ttgcagggaccgtcagtggcgactaygggcagagtgggctattggaccctg

SEQ ID NO: 2099 - DNA, 51 bp, synthetic construct
  misc_feature 1..51: note = Synthetic polynucleotide
  source 1..51: mol_type = other DNA
ctccccatcgctgcacttggactgcdgctcctgcacctgcgcctccagctt

SEQ ID NO: 2100 - DNA, 51 bp, synthetic construct
  misc_feature 1..51: note = Synthetic polynucleotide
  source 1..51: mol_type = other DNA
ctcaacctcttcattgccttactgcycaattcctttagcaatgaggaaaga

SEQ ID NO: 2101 - DNA, 51 bp, synthetic construct
  misc_feature 1..51: note = Synthetic polynucleotide
  source 1..51: mol_type = other DNA
ggagtcagggttgctgggttgaggargagggcttctagggagggggccttg

SEQ ID NO: 2102 - DNA, 51 bp, synthetic construct
  misc_feature 1..51: note = Synthetic polynucleotide
  source 1..51: mol_type = other DNA
cttattggagtcagtgaactggggcyggtattcatgaaaggcaactgggcc

SEQ ID NO: 2103 - DNA, 51 bp, synthetic construct
  misc_feature 1..51: note = Synthetic polynucleotide
  source 1..51: mol_type = other DNA
gaatcagtcactacgattatttcggyaactaactaactataatggaattat

SEQ ID NO: 2104 - DNA, 51 bp, synthetic construct
  misc_feature 1..51: note = Synthetic polynucleotide
  source 1..51: mol_type = other DNA
gcttcttcctaggagccagcaccgcyctttgaccttgccatgcttgcctta

SEQ ID NO: 2105 - DNA, 51 bp, synthetic construct
  misc_feature 1..51: note = Synthetic polynucleotide
  source 1..51: mol_type = other DNA
ctgcagcttgctaacctgcctgatchatacaaagtctttgagaggtgttaa

SEQ ID NO: 2106 - DNA, 51 bp, synthetic construct
  misc_feature 1..51: note = Synthetic polynucleotide
  source 1..51: mol_type = other DNA
acagaaagaagatctggatattgtaygtgaaaggttcactactagtaaact

SEQ ID NO: 2107 - DNA, 51 bp, synthetic construct
  misc_feature 1..51: note = Synthetic polynucleotide
  source 1..51: mol_type = other DNA
ggcaatcaagggacccagatcacggyaagaatggtacatgggagagtaaat

SEQ ID NO: 2108 - DNA, 51 bp, synthetic construct
  misc_feature 1..51: note = Synthetic polynucleotide
  source 1..51: mol_type = other DNA
agccttcaaaatgaatggttacatabccaatgcaaactactcagtgaagaa

SEQ ID NO: 2109 - DNA, 51 bp, synthetic construct
  misc_feature 1..51: note = Synthetic polynucleotide
  source 1..51: mol_type = other DNA
gcatcttcttactcttcatcaaccghaagttaaaaagaaccacatgggaaa

SEQ ID NO: 2110 - DNA, 51 bp, synthetic construct
  misc_feature 1..51: note = Synthetic polynucleotide
  source 1..51: mol_type = other DNA
ttgttggcagtttttgtgactcctcytactgatcttcgttctgacttctcc

SEQ ID NO: 2111 - DNA, 51 bp, synthetic construct
  misc_feature 1..51: note = Synthetic polynucleotide
  source 1..51: mol_type = other DNA
aacagatgttccacatcattactggyaaaaaacctggtttttgggctttgt

SEQ ID NO: 2112 - DNA, 51 bp, synthetic construct
  misc_feature 1..51: note = Synthetic polynucleotide
  source 1..51: mol_type = other DNA
ggcccaaattgggtgttttgtgccaygtgagtcagcagaagtgtccattgt

SEQ ID NO: 2113 - DNA, 51 bp, synthetic construct
  misc_feature 1..51: note = Synthetic polynucleotide
  source 1..51: mol_type = other DNA
cctgataatgatcagttctccaatcbtgaggctctcctcatccagattgga

SEQ ID NO: 2114 - DNA, 51 bp, synthetic construct
  misc_feature 1..51: note = Synthetic polynucleotide
  source 1..51: mol_type = other DNA
cctcatccagattggaccaaaggaaygtgttttacccggaggagagactgc

SEQ ID NO: 2115 - DNA, 51 bp, synthetic construct
  misc_feature 1..51: note = Synthetic polynucleotide
  source 1..51: mol_type = other DNA
ttggatattgcagcagtcagagcccbtaacctttttcaggtaaaaaaaaaa

SEQ ID NO: 2116 - DNA, 51 bp, synthetic construct
  misc_feature 1..51: note = Synthetic polynucleotide
  source 1..51: mol_type = other DNA
aaagtgtgaccacatattttgcaagbaagtttgaatgtgttatgtggctcc

SEQ ID NO: 2117 - DNA, 51 bp, synthetic construct
  misc_feature 1..51: note = Synthetic polynucleotide
  source 1..51: mol_type = other DNA
tatgaggaagacatcctgactgtacytggggttcttttaagtgatacccaa

SEQ ID NO: 2118 - DNA, 51 bp, synthetic construct
  misc_feature 1..51: note = Synthetic polynucleotide
  source 1..51: mol_type = other DNA
aggggtgaatgttcctgaaattcctygtatcccaatgctaaggcaccttta

SEQ ID NO: 2119 - DNA, 51 bp, synthetic construct
  misc_feature 1..51: note = Synthetic polynucleotide
  source 1..51: mol_type = other DNA
acatcgaatagatggatcacaaaacytcaatgaaacgtgggagaactacaa

SEQ ID NO: 2120 - DNA, 51 bp, synthetic construct
  misc_feature 1..51: note = Synthetic polynucleotide
  source 1..51: mol_type = other DNA
ctctcatagcggagctgatactgccrcataaaatcagcttgctcaaattct

SEQ ID NO: 2121 - DNA, 51 bp, synthetic construct
  misc_feature 1..51: note = Synthetic polynucleotide
  source 1..51: mol_type = other DNA
ttcttctagtatccagtccccctaaytagaagagcctgggaacttggttta

SEQ ID NO: 2122 - DNA, 51 bp, synthetic construct
  misc_feature 1..51: note = Synthetic polynucleotide
  source 1..51: mol_type = other DNA
ttcctgtcacagttacagtaaaaggyagagataatgttccaaaaaggatga

SEQ ID NO: 2123 - DNA, 51 bp, synthetic construct
  misc_feature 1..51: note = Synthetic polynucleotide
  source 1..51: mol_type = other DNA
gaagcatcccccagcagcctggctgrgtgtaacacatttttaatctttgag

SEQ ID NO: 2124 - DNA, 51 bp, synthetic construct
  misc_feature 1..51: note = Synthetic polynucleotide
  source 1..51: mol_type = other DNA
gctcctttattcatgtctaatgaccyccgacacatcagccctcaagccaaa

SEQ ID NO: 2125 - DNA, 51 bp, synthetic construct
  misc_feature 1..51: note = Synthetic polynucleotide
  source 1..51: mol_type = other DNA
gtgctggatgttcccgagggcacctygcctgacaaacagagcactgagcaa

SEQ ID NO: 2126 - DNA, 51 bp, synthetic construct
  misc_feature 1..51: note = Synthetic polynucleotide
  source 1..51: mol_type = other DNA
tctgacttaaccataggtgctgtcayggattcatccagaaaataagacggt

SEQ ID NO: 2127 - DNA, 51 bp, synthetic construct
  misc_feature 1..51: note = Synthetic polynucleotide
  source 1..51: mol_type = other DNA
gagtacaatcacatttttccacttcytgaaaagtactgtggcttccatgaa

SEQ ID NO: 2128 - DNA, 51 bp, synthetic construct
  misc_feature 1..51: note = Synthetic polynucleotide
  source 1..51: mol_type = other DNA
ttcttctccgctcctccgacccaggyaggttgttacagatgtcttgagaag

SEQ ID NO: 2129 - DNA, 51 bp, synthetic construct
  misc_feature 1..51: note = Synthetic polynucleotide
  source 1..51: mol_type = other DNA
agagatggctcgctggagctcatggygagtgggtcagagccccatccgagc

SEQ ID NO: 2130 - DNA, 51 bp, synthetic construct
  misc_feature 1..51: note = Synthetic polynucleotide
  source 1..51: mol_type = other DNA
ctggctgattacctcacgctccagghtggtttatttatttgtcttacaaaa

SEQ ID NO: 2131 - DNA, 51 bp, synthetic construct
  misc_feature 1..51: note = Synthetic polynucleotide
  source 1..51: mol_type = other DNA
ttcaccgctccattggtcttgagccragtgggtgatgtccaggggctggca

SEQ ID NO: 2132 - DNA, 51 bp, synthetic construct
  misc_feature 1..51: note = Synthetic polynucleotide
  source 1..51: mol_type = other DNA
cgcctcaacagccacatgaatgcccyccacctggggtcacaggccaaccgc

SEQ ID NO: 2133 - DNA, 51 bp, synthetic construct
  misc_feature 1..51: note = Synthetic polynucleotide
  source 1..51: mol_type = other DNA
caccgatgcacccatgatgatgaatrtgtgtgtatccgactgatggaaggc

SEQ ID NO: 2134 - DNA, 51 bp, synthetic construct
  misc_feature 1..51: note = Synthetic polynucleotide
  source 1..51: mol_type = other DNA
gggtatctctctttgcttcaagttgyaagtgaacactattttctctgaata

SEQ ID NO: 2135 - DNA, 51 bp, synthetic construct
  misc_feature 1..51: note = Synthetic polynucleotide
  source 1..51: mol_type = other DNA
cagaaagagaagtatctcccgaaggygaggaaatggaaatgtaatacacgc

SEQ ID NO: 2136 - DNA, 51 bp, synthetic construct
  misc_feature 1..51: note = Synthetic polynucleotide
  source 1..51: mol_type = other DNA
gaggtcagctttgcggggaaaatggyaaggagcaagggagcaggagggttc

SEQ ID NO: 2137 - DNA, 51 bp, synthetic construct
  misc_feature 1..51: note = Synthetic polynucleotide
  source 1..51: mol_type = other DNA
ccctggtggaacagatggtgaatggyaattacacgagttgatttagataat

SEQ ID NO: 2138 - DNA, 51 bp, synthetic construct
  misc_feature 1..51: note = Synthetic polynucleotide
  source 1..51: mol_type = other DNA
acccgcatccaggatctctacactgygagtaagctggaagtggattgcctc

SEQ ID NO: 2139 - DNA, 51 bp, synthetic construct
  misc_feature 1..51: note = Synthetic polynucleotide
  source 1..51: mol_type = other DNA
aagccaatcccaggaggaaaaacggyaagaagcagcccgaaccaaactttt

SEQ ID NO: 2140 - DNA, 51 bp, synthetic construct
  misc_feature 1..51: note = Synthetic polynucleotide
  source 1..51: mol_type = other DNA
acaagggctggaactggacttcaggygagggctggggtgggcaggaatgga

SEQ ID NO: 2141 - DNA, 51 bp, synthetic construct
  misc_feature 1..51: note = Synthetic polynucleotide
  source 1..51: mol_type = other DNA
cctgttctgtatttagcggaagaagyccctatagaaccatacaacatccca

SEQ ID NO: 2142 - DNA, 51 bp, synthetic construct
  misc_feature 1..51: note = Synthetic polynucleotide
  source 1..51: mol_type = other DNA
tactgcatcatacagacacttgaggracttgatttctttgtccagtgagtc

SEQ ID NO: 2143 - DNA, 51 bp, synthetic construct
  misc_feature 1..51: note = Synthetic polynucleotide
  source 1..51: mol_type = other DNA
gacattcaggatgaaaaccagctgcyggtggccgacgtgaagcggctggga

SEQ ID NO: 2144 - DNA, 51 bp, synthetic construct
  misc_feature 1..51: note = Synthetic polynucleotide
  source 1..51: mol_type = other DNA
ctctgcagacgtggcgtgctgcaccyccaccagagccatggcatcgacgac

SEQ ID NO: 2145 - DNA, 51 bp, synthetic construct
  misc_feature 1..51: note = Synthetic polynucleotide
  source 1..51: mol_type = other DNA
ctgatgaatttcagcacgtcctggcrcactgggctgtgggaggtctgtgag

SEQ ID NO: 2146 - DNA, 51 bp, synthetic construct
  misc_feature 1..51: note = Synthetic polynucleotide
  source 1..51: mol_type = other DNA
gcgcgtggcatagtaatgagcgatcrgcagcatcgtcttgaactcctcatg

SEQ ID NO: 2147 - DNA, 51 bp, synthetic construct
  misc_feature 1..51: note = Synthetic polynucleotide
  source 1..51: mol_type = other DNA
accgggaagatcaagagagctgttcygcagttcactcctgctagctggacc

SEQ ID NO: 2148 - DNA, 51 bp, synthetic construct
  misc_feature 1..51: note = Synthetic polynucleotide
  source 1..51: mol_type = other DNA
ggaccccaaggagtccatcaagcagygtgagctgctcctggaggaaccaga

SEQ ID NO: 2149 - DNA, 51 bp, synthetic construct
  misc_feature 1..51: note = Synthetic polynucleotide
  source 1..51: mol_type = other DNA
gaaaacagaaagtggacaatcatggyaagcaagaaacaaggaatggaggat

SEQ ID NO: 2150 - DNA, 51 bp, synthetic construct
  misc_feature 1..51: note = Synthetic polynucleotide
  source 1..51: mol_type = other DNA
gttgtgtcatcaggctgtcatggtgyccctgctgacagattactcacctca

SEQ ID NO: 2151 - DNA, 51 bp, synthetic construct
  misc_feature 1..51: note = Synthetic polynucleotide
  source 1..51: mol_type = other DNA
tgtcatcaggctgtcatggtgtcccygctgacagattactcacctcagctc

SEQ ID NO: 2152 - DNA, 51 bp, synthetic construct
  misc_feature 1..51: note = Synthetic polynucleotide
  source 1..51: mol_type = other DNA
tgtcatggtgtccctgctgacagatbactcacctcagctccagaagcctaa

SEQ ID NO: 2153 - DNA, 51 bp, synthetic construct
  misc_feature 1..51: note = Synthetic polynucleotide
  source 1..51: mol_type = other DNA
cgtgaccttctcactctaaaaaactytaccggagaagaaattaaatatatg

SEQ ID NO: 2154 - DNA, 51 bp, synthetic construct
  misc_feature 1..51: note = Synthetic polynucleotide
  source 1..51: mol_type = other DNA
ctaaaaaactttaccggagaagaaabtaaatatatgctatggctatcagca

SEQ ID NO: 2155 - DNA, 51 bp, synthetic construct
  misc_feature 1..51: note = Synthetic polynucleotide
  source 1..51: mol_type = other DNA
tttaccggagaagaaattaaatataygctatggctatcagcagatctgaaa

SEQ ID NO: 2156 - DNA, 51 bp, synthetic construct
  misc_feature 1..51: note = Synthetic polynucleotide
  source 1..51: mol_type = other DNA
tatatgctatggctatcagcagatcygaaatttaggataaaacagaaagga

SEQ ID NO: 2157 - DNA, 51 bp, synthetic construct
  misc_feature 1..51: note = Synthetic polynucleotide
  source 1..51: mol_type = other DNA
gtccttgatttatagtatttgccttyattgcaagggaagtccttaggcatg

SEQ ID NO: 2158 - DNA, 51 bp, synthetic construct
  misc_feature 1..51: note = Synthetic polynucleotide
  source 1..51: mol_type = other DNA
gagaaaagaagtactcgaacaagatygtctacagaaacaggtaagtccact

SEQ ID NO: 2159 - DNA, 51 bp, synthetic construct
  misc_feature 1..51: note = Synthetic polynucleotide
  source 1..51: mol_type = other DNA
cgtcctttacacaattaaaagaagaygctgtttaatctgaggatcctgtta

SEQ ID NO: 2160 - DNA, 51 bp, synthetic construct
  misc_feature 1..51: note = Synthetic polynucleotide
  source 1..51: mol_type = other DNA
tgaaagtctcacggacacggcccggyttgtaaatattttcttctctccaaa

SEQ ID NO: 2161 - DNA, 51 bp, synthetic construct
  misc_feature 1..51: note = Synthetic polynucleotide
  source 1..51: mol_type = other DNA
tttttcttggtttgccacagtgtatygtctagcatggcagatgcagtattg

SEQ ID NO: 2162 - DNA, 51 bp, synthetic construct
  misc_feature 1..51: note = Synthetic polynucleotide
  source 1..51: mol_type = other DNA
tttcttggtttgccacagtgtattgyctagcatggcagatgcagtattggc

SEQ ID NO: 2163 - DNA, 51 bp, synthetic construct
  misc_feature 1..51: note = Synthetic polynucleotide
  source 1..51: mol_type = other DNA
ttgtctagcatggcagatgcagtatyggctcgagtgtataaacaatcagat

SEQ ID NO: 2164 - DNA, 51 bp, synthetic construct
  misc_feature 1..51: note = Synthetic polynucleotide
  source 1..51: mol_type = other DNA
gctcgagtgtataaacaatcagattbggacaccctggctaaagaagcatcc

SEQ ID NO: 2165 - DNA, 51 bp, synthetic construct
  misc_feature 1..51: note = Synthetic polynucleotide
  source 1..51: mol_type = other DNA
ctggctaaagaagcatccatcccaaytatcaatgggctgtcagatttgtac

SEQ ID NO: 2166 - DNA, 51 bp, synthetic construct
  misc_feature 1..51: note = Synthetic polynucleotide
  misc_difference 26: note = n is a, c, g, t or u
  source 1..51: mol_type = other DNA
gctaaagaagcatccatcccaattancaatgggctgtcagatttgtaccat

SEQ ID NO: 2167 - DNA, 51 bp, synthetic construct
  misc_feature 1..51: note = Synthetic polynucleotide
  source 1..51: mol_type = other DNA
atccatcccaattatcaatgggctgycagatttgtaccatcctatccagat

SEQ ID NO: 2168 - DNA, 51 bp, synthetic construct
  misc_feature 1..51: note = Synthetic polynucleotide
  source 1..51: mol_type = other DNA
ccatcctatccagatcctggctgatyacctcacgctccaggttggtttatt

SEQ ID NO: 2169 - DNA, 51 bp, synthetic construct
  misc_feature 1..51: note = Synthetic polynucleotide
  source 1..51: mol_type = other DNA
cagatcctggctgattacctcacgcyccaggttggtttatttatttgtctt

SEQ ID NO: 2170 - DNA, 51 bp, synthetic construct
  misc_feature 1..51: note = Synthetic polynucleotide
  source 1..51: mol_type = other DNA
ctctctgaaaggtcttaccctcagcbggatcggggatgggaacaatatcct

SEQ ID NO: 2171 - DNA, 51 bp, synthetic construct
  misc_feature 1..51: note = Synthetic polynucleotide
  source 1..51: mol_type = other DNA
tggatcggggatgggaacaatatccygcactccatcatgatgagcgcagcg

SEQ ID NO: 2172 - DNA, 51 bp, synthetic construct
  misc_feature 1..51: note = Synthetic polynucleotide
  source 1..51: mol_type = other DNA
caccttcaggcagctactccaaaggyagggaaactttttgccttgaaacta

SEQ ID NO: 2173 - DNA, 51 bp, synthetic construct
  misc_feature 1..51: note = Synthetic polynucleotide
  source 1..51: mol_type = other DNA
gaagcagcgcatggaggcaatgtatyaattacagacacttggataagcatg

SEQ ID NO: 2174 - DNA, 51 bp, synthetic construct
  misc_feature 1..51: note = Synthetic polynucleotide
  source 1..51: mol_type = other DNA
aggcaatgtattaattacagacactyggataagcatgggacaagaagagga

SEQ ID NO: 2175 - DNA, 51 bp, synthetic construct
  misc_feature 1..51: note = Synthetic polynucleotide
  source 1..51: mol_type = other DNA
ttaattacagacacttggataagcaygggacaagaagaggagaagaaaaag

SEQ ID NO: 2176 - DNA, 51 bp, synthetic construct
  misc_feature 1..51: note = Synthetic polynucleotide
  source 1..51: mol_type = other DNA
tgcctctgactggacatttttacacbgcttgcccagaaagccagaagaagt

SEQ ID NO: 2177 - DNA, 51 bp, synthetic construct
  misc_feature 1..51: note = Synthetic polynucleotide
  source 1..51: mol_type = other DNA
ccagaagaagtggatgatgaagtctyttattctcctcgatcactagtgttc

SEQ ID NO: 2178 - DNA, 51 bp, synthetic construct
  misc_feature 1..51: note = Synthetic polynucleotide
  source 1..51: mol_type = other DNA
cctggtggacggcgtccctttcagcygctgcaatcctagctcgccacggcc

SEQ ID NO: 2179 - DNA, 51 bp, synthetic construct
  misc_feature 1..51: note = Synthetic polynucleotide
  source 1..51: mol_type = other DNA
ccaccagacggaggagctcaacctgygggtgcgtggctgcagggctgccct

SEQ ID NO: 2180 - DNA, 51 bp, synthetic construct
  misc_feature 1..51: note = Synthetic polynucleotide
  source 1..51: mol_type = other DNA
agagtcaataatcctttcaagaaagrtactatttcatttcctcccaacttg

SEQ ID NO: 2181 - DNA, 51 bp, synthetic construct
  misc_feature 1..51: note = Synthetic polynucleotide
  source 1..51: mol_type = other DNA
gggttcatgggtgagtccttgggacrgtggaaagcccggccaaactcctca

SEQ ID NO: 2182 - DNA, 51 bp, synthetic construct
  misc_feature 1..51: note = Synthetic polynucleotide
  source 1..51: mol_type = other DNA
ggccggagatgggcactctcgggtcrtatctctagacctggggcttcacgg

SEQ ID NO: 2183 - DNA, 51 bp, synthetic construct
  misc_feature 1..51: note = Synthetic polynucleotide
  source 1..51: mol_type = other DNA
tcttttgtttccttgtaggtacatgyttataggtgggaccaattttgccta

SEQ ID NO: 2184 - DNA, 51 bp, synthetic construct
  misc_feature 1..51: note = Synthetic polynucleotide
  source 1..51: mol_type = other DNA
ttaggagttggaccactcattgtacycagagcactagaaggactaggagag

SEQ ID NO: 2185 - DNA, 51 bp, synthetic construct
  misc_feature 1..51: note = Synthetic polynucleotide
  source 1..51: mol_type = other DNA
cccctcaccctgtggcaagtacatgygagtgcaggcggagcaggcagggcg

SEQ ID NO: 2186 - DNA, 51 bp, synthetic construct
  misc_feature 1..51: note = Synthetic polynucleotide
  source 1..51: mol_type = other DNA
acctccatgttcactgggtctgcctytaaccgcagcatccatcgggtcttc

SEQ ID NO: 2187 - DNA, 51 bp, synthetic construct
  misc_feature 1..51: note = Synthetic polynucleotide
  source 1..51: mol_type = other DNA
tctgaaggatgaccagccccatgggracctacaaataagatataaagaata

SEQ ID NO: 2188 - DNA, 51 bp, synthetic construct
  misc_feature 1..51: note = Synthetic polynucleotide
  source 1..51: mol_type = other DNA
ccatgtctcccagaggggatgaacartatagtctatgaagcccacctagtt

SEQ ID NO: 2189 - DNA, 51 bp, synthetic construct
  misc_feature 1..51: note = Synthetic polynucleotide
  source 1..51: mol_type = other DNA
ccttctgtcctctgtgttggagcaarcatgcctaactcagaaacacataca

SEQ ID NO: 2190 - DNA, 51 bp, synthetic construct
  misc_feature 1..51: note = Synthetic polynucleotide
  source 1..51: mol_type = other DNA
caggacttcctggggctgcagtgaghatagctgctaacatcacacaattac

SEQ ID NO: 2191 - DNA, 51 bp, synthetic construct
  misc_feature 1..51: note = Synthetic polynucleotide
  source 1..51: mol_type = other DNA
gcacctggagctccaggaggcaaggyagtatttcaatttattctctacctt

SEQ ID NO: 2192 - DNA, 51 bp, synthetic construct
  misc_feature 1..51: note = Synthetic polynucleotide
  source 1..51: mol_type = other DNA
cggccaggacttcctggggctgcaghgagtatagctgctaacatcacacaa

SEQ ID NO: 2193 - DNA, 51 bp, synthetic construct
  misc_feature 1..51: note = Synthetic polynucleotide
  source 1..51: mol_type = other DNA
cgagatggatctcctggtggcaaggbataataaacacatgtgcaattgatt

SEQ ID NO: 2194 - DNA, 51 bp, synthetic construct
  misc_feature 1..51: note = Synthetic polynucleotide
  source 1..51: mol_type = other DNA
ccagctggccagcctggagataaggyaacccttaatactacctggatataa

SEQ ID NO: 2195 - DNA, 51 bp, synthetic construct
  misc_feature 1..51: note = Synthetic polynucleotide
  source 1..51: mol_type = other DNA
ttccccggtcctaaaggaaatgatgbgagttccttcattaatttcttcaat

SEQ ID NO: 2196 - DNA, 51 bp, synthetic construct
  misc_feature 1..51: note = Synthetic polynucleotide
  source 1..51: mol_type = other DNA
ctggtgaacctggaagagatgtgagyagcagtttttattcaaccagccagg

SEQ ID NO: 2197 - DNA, 51 bp, synthetic construct
  misc_feature 1..51: note = Synthetic polynucleotide
  source 1..51: mol_type = other DNA
ggacgttggccctgtttgctttttayaaaccaaactctatctgaaatccca

SEQ ID NO: 2198 - DNA, 51 bp, synthetic construct
  misc_feature 1..51: note = Synthetic polynucleotide
  source 1..51: mol_type = other DNA
ccccctggaggttctggacctgctgyaagttccttcctctttctctgtcta

SEQ ID NO: 2199 - DNA, 51 bp, synthetic construct
  misc_feature 1..51: note = Synthetic polynucleotide
  source 1..51: mol_type = other DNA
tatactccaactggggagttccgtgyggaccgtgaaggttctccagtgctg

SEQ ID NO: 2200 - DNA, 51 bp, synthetic construct
  misc_feature 1..51: note = Synthetic polynucleotide
  source 1..51: mol_type = other DNA
taacattccccagctggaagacgttyctcagttcctgcagagtaagtccac

SEQ ID NO: 2201 - DNA, 51 bp, synthetic construct
  misc_feature 1..51: note = Synthetic polynucleotide
  source 1..51: mol_type = other DNA
ggacagaggacaatggcttccatggbaaggtgcctgcatgtacctgtgcta

SEQ ID NO: 2202 - DNA, 51 bp, synthetic construct
  misc_feature 1..51: note = Synthetic polynucleotide
  source 1..51: mol_type = other DNA
ataccacttctcagcttgtgcaaacrgctgtcgcagaagtaacacattggt

SEQ ID NO: 2203 - DNA, 51 bp, synthetic construct
  misc_feature 1..51: note = Synthetic polynucleotide
  source 1..51: mol_type = other DNA
cgccagccacagccctggtgcctggyggcacacaatggtgaccgctacgac

SEQ ID NO: 2204 - DNA, 51 bp, synthetic construct
  misc_feature 1..51: note = Synthetic polynucleotide
  source 1..51: mol_type = other DNA
tttgtgttgataagctctacggtgtraagagttgcgagtgtggaacatgtc

SEQ ID NO: 2205 - DNA, 51 bp, synthetic construct
  misc_feature 1..51: note = Synthetic polynucleotide
  source 1..51: mol_type = other DNA
cagatcaccgaccaggtgtccctgcyacgcctcacctggagcgagctgttc

SEQ ID NO: 2206 - DNA, 51 bp, synthetic construct
  misc_feature 1..51: note = Synthetic polynucleotide
  source 1..51: mol_type = other DNA
tgcctatatatatttaaagatactcrctactatgcttccttctgggagttt

SEQ ID NO: 2207 - DNA, 51 bp, synthetic construct
  misc_feature 1..51: note = Synthetic polynucleotide
  source 1..51: mol_type = other DNA
aggatcagatgaagcagatggaaggyaggaaccagttttgaatgttttcca

SEQ ID NO: 2208 - DNA, 51 bp, synthetic construct
  misc_feature 1..51: note = Synthetic polynucleotide
  source 1..51: mol_type = other DNA
catatgtctttattggcgtgcgctcytgaggttgtaatggccacatatagc

SEQ ID NO: 2209 - DNA, 51 bp, synthetic construct
  misc_feature 1..51: note = Synthetic polynucleotide
  source 1..51: mol_type = other DNA
gctattgttaatgcagtaccctgctytgctttggatggacaatggattcta

SEQ ID NO: 2210 - DNA, 51 bp, synthetic construct
  misc_feature 1..51: note = Synthetic polynucleotide
  source 1..51: mol_type = other DNA
tcggtcagcggcggggtggtgagcgrgcccgcgtaggtccagtaatcccag

SEQ ID NO: 2211 - DNA, 51 bp, synthetic construct
  misc_feature 1..51: note = Synthetic polynucleotide
  source 1..51: mol_type = other DNA
tccctgagtcgggaggccaagccatrtaacaggatcccggtagctttgtca

SEQ ID NO: 2212 - DNA, 51 bp, synthetic construct
  misc_feature 1..51: note = Synthetic polynucleotide
  source 1..51: mol_type = other DNA
ggcatcaagttgaccatcaacaaacycctggacatggcagcccaagtaagg

SEQ ID NO: 2213 - DNA, 51 bp, synthetic construct
  misc_feature 1..51: note = Synthetic polynucleotide
  source 1..51: mol_type = other DNA
taccaagtcattcacataatttttcrgctgatcaacaatatctataagttg

SEQ ID NO: 2214 - DNA, 51 bp, synthetic construct
  misc_feature 1..51: note = Synthetic polynucleotide
  source 1..51: mol_type = other DNA
tgtggcaagatcagctttgagctgaygcgggagccgtgcatcacgcccagt

SEQ ID NO: 2215 - DNA, 51 bp, synthetic construct
  misc_feature 1..51: note = Synthetic polynucleotide
  source 1..51: mol_type = other DNA
tcagaacacttcccatcctccgcagygtaaccagctctttgagctcctgca

SEQ ID NO: 2216 - DNA, 51 bp, synthetic construct
  misc_feature 1..51: note = Synthetic polynucleotide
  source 1..51: mol_type = other DNA
ctgaagtaccccatcgagcacggcaycgtcaccaactgggacgacatggag

SEQ ID NO: 2217 - DNA, 51 bp, synthetic construct
  misc_feature 1..51: note = Synthetic polynucleotide
  source 1..51: mol_type = other DNA
aaccccaaggccaaccgcgagaagaygacccaggtgagtggcccgctacct

SEQ ID NO: 2218 - DNA, 51 bp, synthetic construct
  misc_feature 1..51: note = Synthetic polynucleotide
  source 1..51: mol_type = other DNA
tacacttactgatggtcattcagcayggactgggacaggtaatactaaaaa

SEQ ID NO: 2219 - DNA, 51 bp, synthetic construct
  misc_feature 1..51: note = Synthetic polynucleotide
  source 1..51: mol_type = other DNA
ctggagagagccaaagtaccataggyaaatacatatttactacttgggatt

SEQ ID NO: 2220 - DNA, 51 bp, synthetic construct
  misc_feature 1..51: note = Synthetic polynucleotide
  source 1..51: mol_type = other DNA
cgaggcggatcgggtgttgcatccahggagcgagctgagagctcgaggtga

SEQ ID NO: 2221 - DNA, 51 bp, synthetic construct
  misc_feature 1..51: note = Synthetic polynucleotide
  source 1..51: mol_type = other DNA
atgccacgtacctcttctgctgtccrgaaggaagcctgtgcctgtttatac

SEQ ID NO: 2222 - DNA, 51 bp, synthetic construct
  misc_feature 1..51: note = Synthetic polynucleotide
  source 1..51: mol_type = other DNA
ctcgatgagaatttgaaagccatagraacagcgagcctctggaacctgcac

SEQ ID NO: 2223 - DNA, 51 bp, synthetic construct
  misc_feature 1..51: note = Synthetic polynucleotide
  source 1..51: mol_type = other DNA
ttaaaagaaactcaagtttgtactcrccgattttcaaaacataacacgcat

SEQ ID NO: 2224 - DNA, 51 bp, synthetic construct
  misc_feature 1..51: note = Synthetic polynucleotide
  source 1..51: mol_type = other DNA
aaacataacacgcattcattgggatragtatttccatcagtcccacagaca

SEQ ID NO: 2225 - DNA, 51 bp, synthetic construct
  misc_feature 1..51: note = Synthetic polynucleotide
  source 1..51: mol_type = other DNA
gcggatgtagctcagcatgatgcccrgggtgaagaagccgaagaatcccag

SEQ ID NO: 2226 - DNA, 51 bp, synthetic construct
  misc_feature 1..51: note = Synthetic polynucleotide
  source 1..51: mol_type = other DNA
cgtttgtaaagcacatctccaaaggyagcgggttccgttccttgtaataat

SEQ ID NO: 2227 - DNA, 51 bp, synthetic construct
  misc_feature 1..51: note = Synthetic polynucleotide
  source 1..51: mol_type = other DNA
cacctgccctgtccttctgcaggacygccccattgcctgggccaacctcat

SEQ ID NO: 2228 - DNA, 51 bp, synthetic construct
  misc_feature 1..51: note = Synthetic polynucleotide
  source 1..51: mol_type = other DNA
tacattgggttgcccttgaccctcaytgtgattgaagtcatcccgttcctg

SEQ ID NO: 2229 - DNA, 51 bp, synthetic construct
  misc_feature 1..51: note = Synthetic polynucleotide
  source 1..51: mol_type = other DNA
gggagtgccggggccaccattcggcygtacatcgatagctatgagaaggac

SEQ ID NO: 2230 - DNA, 51 bp, synthetic construct
  misc_feature 1..51: note = Synthetic polynucleotide
  source 1..51: mol_type = other DNA
ttggttgatcctttgggtgaaatgtyggcaccatcctgggaggaacatgcc

SEQ ID NO: 2231 - DNA, 51 bp, synthetic construct
  misc_feature 1..51: note = Synthetic polynucleotide
  source 1..51: mol_type = other DNA
gaattacaacaatcagtcttcaaatbttggacccatgaagggaggaaattt

SEQ ID NO: 2232 - DNA, 51 bp, synthetic construct
  misc_feature 1..51: note = Synthetic polynucleotide
  source 1..51: mol_type = other DNA
ttttggacccatgaagggaggaaatyttggaggcagaagctctggccccta

SEQ ID NO: 2233 - DNA, 51 bp, synthetic construct
  misc_feature 1..51: note = Synthetic polynucleotide
  source 1..51: mol_type = other DNA
ggtggtgcttccctcaagcccgaatycgtggacatcatcaatgccaaacaa

SEQ ID NO: 2234 - DNA, 51 bp, synthetic construct
  misc_feature 1..51: note = Synthetic polynucleotide
  source 1..51: mol_type = other DNA
tctgacgacattgaagctagccgaaygtaagtgtaacttggttgagactgt

SEQ ID NO: 2235 - DNA, 51 bp, synthetic construct
  misc_feature 1..51: note = Synthetic polynucleotide
  source 1..51: mol_type = other DNA
attgaaactgcctttctcaatgcachtgtatatttgtcacctaacgtggaa

SEQ ID NO: 2236 - DNA, 51 bp, synthetic construct
  misc_feature 1..51: note = Synthetic polynucleotide
  source 1..51: mol_type = other DNA
agtggagactggaatcccttacacaytgatcctaactttgctagtctagca

SEQ ID NO: 2237 - DNA, 51 bp, synthetic construct
  misc_feature 1..51: note = Synthetic polynucleotide
  source 1..51: mol_type = other DNA
gtccatttgatcattgtctctggtgrgcgatataggaatattaatttggca

SEQ ID NO: 2238 - DNA, 51 bp, synthetic construct
  misc_feature 1..51: note = Synthetic polynucleotide
  source 1..51: mol_type = other DNA
gcacctcaggcccacagaggtcctcrccgcggtaggtcagattgtccgggt

SEQ ID NO: 2239 - DNA, 51 bp, synthetic construct
  misc_feature 1..51: note = Synthetic polynucleotide
  source 1..51: mol_type = other DNA
gccgatgaacgcgttcatggtatggyccaagatcgaacgcaggaagatcat

SEQ ID NO: 2240 - DNA, 51 bp, synthetic construct
  misc_feature 1..51: note = Synthetic polynucleotide
  source 1..51: mol_type = other DNA
tgatgtatgtatctaattaaccttgraagtcgtaataaacgcaagagactg

SEQ ID NO: 2241 - DNA, 51 bp, synthetic construct
  misc_feature 1..51: note = Synthetic polynucleotide
  source 1..51: mol_type = other DNA
caccagtggcaaagaatgcgctctaygtggagagtggcccaccatgcctca

SEQ ID NO: 2242 - DNA, 51 bp, synthetic construct
  misc_feature 1..51: note = Synthetic polynucleotide
  source 1..51: mol_type = other DNA
ctgaatgcccaagtccttcagcaccrggagccctgcaccagccagcagaca

SEQ ID NO: 2243 - DNA, 51 bp, synthetic construct
  misc_feature 1..51: note = Synthetic polynucleotide
  source 1..51: mol_type = other DNA
cgcaaaatactccttcagcggagcgragaggtggcggatgactggcacgct

SEQ ID NO: 2244 - DNA, 51 bp, synthetic construct
  misc_feature 1..51: note = Synthetic polynucleotide
  source 1..51: mol_type = other DNA
gaggaagaccagaaggatgtacatcrtgatttctgagaccacagaggtgaa

SEQ ID NO: 2245 - DNA, 51 bp, synthetic construct
  misc_feature 1..51: note = Synthetic polynucleotide
  source 1..51: mol_type = other DNA
ttctccatgtatgccccagccttcaygatggtggtgatcagcctggaccgc

SEQ ID NO: 2246 - DNA, 51 bp, synthetic construct
  misc_feature 1..51: note = Synthetic polynucleotide
  source 1..51: mol_type = other DNA
gcagacgcctaccttaatgaaaccgrtatccttcgcgtactgacggaaaca

SEQ ID NO: 2247 - DNA, 51 bp, synthetic construct
  misc_feature 1..51: note = Synthetic polynucleotide
  source 1..51: mol_type = other DNA
cagggtacagggcagcatgatgtacrgcggattgaggccgatggagcgaga

SEQ ID NO: 2248 - DNA, 51 bp, synthetic construct
  misc_feature 1..51: note = Synthetic polynucleotide
  source 1..51: mol_type = other DNA
ttttcaagaaaatagctataataccbatgcctcagcaatacatagaactga

SEQ ID NO: 2249 - DNA, 51 bp, synthetic construct
  misc_feature 1..51: note = Synthetic polynucleotide
  source 1..51: mol_type = other DNA
agaggacccttttcactcttggaggyaataaaaatttcatcatctactatt

SEQ ID NO: 2250 - DNA, 51 bp, synthetic construct
  misc_feature 1..51: note = Synthetic polynucleotide
  source 1..51: mol_type = other DNA
gtgttggagcagctcaatggaagacrggatctgaaacaaagcccaagaatg

SEQ ID NO: 2251 - DNA, 51 bp, synthetic construct
  misc_feature 1..51: note = Synthetic polynucleotide
  source 1..51: mol_type = other DNA
gtcagagcccttaacctttttcaggbaaaaaaaaaaaaaaaaaaaaaaaaa

SEQ ID NO: 2252 - DNA, 51 bp, synthetic construct
  misc_feature 1..51: note = Synthetic polynucleotide
  source 1..51: mol_type = other DNA
gggaggggatggggcagctgcgccaygtgcaccacccttttcctgctcagc

SEQ ID NO: 2253 - DNA, 51 bp, synthetic construct
  misc_feature 1..51: note = Synthetic polynucleotide
  source 1..51: mol_type = other DNA
agccacaaagtttttatgtggatcartatcctcggaaagaattagactgtt

SEQ ID NO: 2254 - DNA, 51 bp, synthetic construct
  misc_feature 1..51: note = Synthetic polynucleotide
  source 1..51: mol_type = other DNA
tcctaaattgacaggtgaagtatgcygtccagatgaacagcacaatcgggt

SEQ ID NO: 2255 - DNA, 51 bp, synthetic construct
  misc_feature 1..51: note = Synthetic polynucleotide
  source 1..51: mol_type = other DNA
gaggctcgctccctcagcacagagcycttcaaactcaagaacgcctatgag

SEQ ID NO: 2256 - DNA, 51 bp, synthetic construct
  misc_feature 1..51: note = Synthetic polynucleotide
  source 1..51: mol_type = other DNA
gagacacgcagccgcaacgaggcccygagggtgaagaagaagatggaagga

SEQ ID NO: 2257 - DNA, 51 bp, synthetic construct
  misc_feature 1..51: note = Synthetic polynucleotide
  source 1..51: mol_type = other DNA
gaggcccagaagcaagtcaagagccyccagagcttgttgaaggtactcacc

SEQ ID NO: 2258 - DNA, 51 bp, synthetic construct
  misc_feature 1..51: note = Synthetic polynucleotide
  source 1..51: mol_type = other DNA
aatctcatgaagacccctctctttgyggtcatcacttgtgcaatccagatg

SEQ ID NO: 2259 - DNA, 51 bp, synthetic construct
  misc_feature 1..51: note = Synthetic polynucleotide
  source 1..51: mol_type = other DNA
gcgcaagaggctgcggtgagccaagygagtacagcgcacctgggggggcgc

SEQ ID NO: 2260 - DNA, 51 bp, synthetic construct
  misc_feature 1..51: note = Synthetic polynucleotide
  source 1..51: mol_type = other DNA
cctggagaaagtgaaattgaccaacyttttactattcagaaggtgctagga

SEQ ID NO: 2261 - DNA, 51 bp, synthetic construct
  misc_feature 1..51: note = Synthetic polynucleotide
  source 1..51: mol_type = other DNA
ctcaccttctgctccgttgtggaccycatcaatcactaccgccacgagtct

SEQ ID NO: 2262 - DNA, 51 bp, synthetic construct
  misc_feature 1..51: note = Synthetic polynucleotide
  source 1..51: mol_type = other DNA
ttcctgctctttgtgctggagaacaygctggggcttttgcggcaccgaggg

SEQ ID NO: 2263 - DNA, 51 bp, synthetic construct
  misc_feature 1..51: note = Synthetic polynucleotide
  source 1..51: mol_type = other DNA
ccttgctgcctccagccagcgcagcrcgtgggcacctgggagctgcgagca

SEQ ID NO: 2264 - DNA, 51 bp, synthetic construct
  misc_feature 1..51: note = Synthetic polynucleotide
  source 1..51: mol_type = other DNA
ggggcacttgtgaccggcccggcgcygtacggcctgctgacctatgtgacc

SEQ ID NO: 2265 - DNA, 51 bp, synthetic construct
  misc_feature 1..51: note = Synthetic polynucleotide
  source 1..51: mol_type = other DNA
cgtgaggccatcaaccgggcccgacygcgggatgctggtggcttggatcta

SEQ ID NO: 2266 - DNA, 51 bp, synthetic construct
  misc_feature 1..51: note = Synthetic polynucleotide
  source 1..51: mol_type = other DNA
ataatcctatttattacctcagaagyttttttcttcgcaggatttttctga

SEQ ID NO: 2267 - DNA, 51 bp, synthetic construct
  misc_feature 1..51: note = Synthetic polynucleotide
  source 1..51: mol_type = other DNA
actagtcacagccctatactccctcyacatatttaccacaacacaatgggg

SEQ ID NO: 2268 - DNA, 51 bp, synthetic construct
  misc_feature 1..51: note = Synthetic polynucleotide
  source 1..51: mol_type = other DNA
atcagctcggtccagaagctggttcygtatgagactagagctgtgagtacc

SEQ ID NO: 2269 - DNA, 51 bp, synthetic construct
  misc_feature 1..51: note = Synthetic polynucleotide
  source 1..51: mol_type = other DNA
tcaagaaattcaaggacagtgaaggyagatatatatatatatatatatata

SEQ ID NO: 2270 - DNA, 51 bp, synthetic construct
  misc_feature 1..51: note = Synthetic polynucleotide
  source 1..51: mol_type = other DNA
ccatctgataagattaaaaagttccycacggagtcccatgaccgacaggcc

SEQ ID NO: 2271 - DNA, 51 bp, synthetic construct
  misc_feature 1..51: note = Synthetic polynucleotide
  source 1..51: mol_type = other DNA
atcttcatagtggttttcttcatggrataccaccgggttttccaagtggcc

SEQ ID NO: 2272 - DNA, 51 bp, synthetic construct
  misc_feature 1..51: note = Synthetic polynucleotide
  source 1..51: mol_type = other DNA
tcgaaggagcccagcgtgttgatgcrcttgcccgcatgctcgcaggggttg

SEQ ID NO: 2273 - DNA, 51 bp, synthetic construct
  misc_feature 1..51: note = Synthetic polynucleotide
  source 1..51: mol_type = other DNA
gatgattcagattgacacatacagtyataacaatcgtagcaataaacccat

SEQ ID NO: 2274 - DNA, 51 bp, synthetic construct
  misc_feature 1..51: note = Synthetic polynucleotide
  source 1..51: mol_type = other DNA
cgcaggttaatccccagaggctccayggagttccctggcctggggtccctg

SEQ ID NO: 2275 - DNA, 51 bp, synthetic construct
  misc_feature 1..51: note = Synthetic polynucleotide
  source 1..51: mol_type = other DNA
tactgtggtggctccgctcagctcaygagggcacagagcatggcctccaga

SEQ ID NO: 2276 - DNA, 51 bp, synthetic construct
  misc_feature 1..51: note = Synthetic polynucleotide
  source 1..51: mol_type = other DNA
ggcgcgggcggcaacaagagccgccytactctctccatgtcagtggccgtg

SEQ ID NO: 2277 - DNA, 51 bp, synthetic construct
  misc_feature 1..51: note = Synthetic polynucleotide
  source 1..51: mol_type = other DNA
ttctgggcaaaccagaatttgacttytagtaaggtaagtttaagttttaga

SEQ ID NO: 2278 - DNA, 51 bp, synthetic construct
  misc_feature 1..51: note = Synthetic polynucleotide
  source 1..51: mol_type = other DNA
taagacctgggctcactgcatgtccyacagcaactccgcgctgaacccgct

SEQ ID NO: 2279 - DNA, 51 bp, synthetic construct
  misc_feature 1..51: note = Synthetic polynucleotide
  source 1..51: mol_type = other DNA
aaagcttgatacgattagcagaaggyctatttcattcagcgaatgatgctt

SEQ ID NO: 2280 - DNA, 51 bp, synthetic construct
  misc_feature 1..51: note = Synthetic polynucleotide
  source 1..51: mol_type = other DNA
gacatgtggtcggtgggctgtattcytggggagcttagcgatggacagcct

SEQ ID NO: 2281 - DNA, 51 bp, synthetic construct
  misc_feature 1..51: note = Synthetic polynucleotide
  source 1..51: mol_type = other DNA
gagaaattctccaacaacaacgaggyattgccagcagtgcaggcggcccct

SEQ ID NO: 2282 - DNA, 51 bp, synthetic construct
  misc_feature 1..51: note = Synthetic polynucleotide
  source 1..51: mol_type = other DNA
ttcaggatggccacgctgcccgtccrctccgcagggttggcgccgtctgtg

SEQ ID NO: 2283 - DNA, 51 bp, synthetic construct
  misc_feature 1..51: note = Synthetic polynucleotide
  source 1..51: mol_type = other DNA
gctccggttcctgaagtacagggtgrggttgaaggcctggccccggcgaac

SEQ ID NO: 2284 - DNA, 51 bp, synthetic construct
  misc_feature 1..51: note = Synthetic polynucleotide
  source 1..51: mol_type = other DNA
taccttcattccttcaaactgggacrgcgcacgaagaggcctcagtgctcg

SEQ ID NO: 2285 - DNA, 51 bp, synthetic construct
  misc_feature 1..51: note = Synthetic polynucleotide
  source 1..51: mol_type = other DNA
gggctctactcagtcttcttcttcaytgtggtcattttcctgggctccttc

SEQ ID NO: 2286 - DNA, 51 bp, synthetic construct
  misc_feature 1..51: note = Synthetic polynucleotide
  source 1..51: mol_type = other DNA
catgatcctgagactttggaagcaaytgcagaaaatgcaaaaggcttggct

SEQ ID NO: 2287 - DNA, 51 bp, synthetic construct
  misc_feature 1..51: note = Synthetic polynucleotide
  source 1..51: mol_type = other DNA
taatgaataggttttgatggcacttyatttgactactttaatggttatgaa

SEQ ID NO: 2288 - DNA, 51 bp, synthetic construct
  misc_feature 1..51: note = Synthetic polynucleotide
  source 1..51: mol_type = other DNA
atagacacctatggaaagatgtgggyaagaagactgcagaaatcttgacat

SEQ ID NO: 2289 - DNA, 51 bp, synthetic construct
  misc_feature 1..51: note = Synthetic polynucleotide
  source 1..51: mol_type = other DNA
tggggtctacggacaaaaacagataytaaaaaggttagaaaaagctaaatt

SEQ ID NO: 2290 - DNA, 51 bp, synthetic construct
  misc_feature 1..51: note = Synthetic polynucleotide
  source 1..51: mol_type = other DNA
tcaagaacatgatatcactaatttcyatatgctcaccctagacaaagtaag

SEQ ID NO: 2291 - DNA, 51 bp, synthetic construct
  misc_feature 1..51: note = Synthetic polynucleotide
  source 1..51: mol_type = other DNA
aaaaaatatgctggattcattcatgyatgtattttaacattttataaccta

SEQ ID NO: 2292 - DNA, 51 bp, synthetic construct
  misc_feature 1..51: note = Synthetic polynucleotide
  source 1..51: mol_type = other DNA
ggaggacggacgttactctgtggacyactccaagtttggcaacaccgtcaa

SEQ ID NO: 2293 - DNA, 51 bp, synthetic construct
  misc_feature 1..51: note = Synthetic polynucleotide
  source 1..51: mol_type = other DNA
ctcttcatttttcgcattatgatccycgttgtggctgcaaaggaggtgtgg

SEQ ID NO: 2294 - DNA, 51 bp, synthetic construct
  misc_feature 1..51: note = Synthetic polynucleotide
  source 1..51: mol_type = other DNA
ctttaatgtgcttttacttccggaayactcaagcaaagaaaaacttaaaga

SEQ ID NO: 2295 - DNA, 51 bp, synthetic construct
  misc_feature 1..51: note = Synthetic polynucleotide
  source 1..51: mol_type = other DNA
gccatcttcctgcacttctccctgcycacctgcctttcctggatgggcctc

SEQ ID NO: 2296 - DNA, 51 bp, synthetic construct
  misc_feature 1..51: note = Synthetic polynucleotide
  source 1..51: mol_type = other DNA
ccgagagcatgagcatgtggtagaaygcatttcctgggctccagaaagctc

SEQ ID NO: 2297 - DNA, 51 bp, synthetic construct
  misc_feature 1..51: note = Synthetic polynucleotide
  source 1..51: mol_type = other DNA
gtggacagctggaaggcctcgttccyccgagctggcgtctaccccgagaag

SEQ ID NO: 2298 - DNA, 51 bp, synthetic construct
  misc_feature 1..51: note = Synthetic polynucleotide
  source 1..51: mol_type = other DNA
ctggagaccggggttgtcaaaaaacyctacactctggatggaaaacaggta

SEQ ID NO: 2299 - DNA, 51 bp, synthetic construct
  misc_feature 1..51: note = Synthetic polynucleotide
  source 1..51: mol_type = other DNA
tcttttgagcaagtcctcactgataycacagaagccatcaaactggagacc

SEQ ID NO: 2300 - DNA, 51 bp, synthetic construct
  misc_feature 1..51: note = Synthetic polynucleotide
  source 1..51: mol_type = other DNA
agacaacttctttaaaaaggtggagyacaccaagaatgtcaatcccaactg

SEQ ID NO: 2301 - DNA, 51 bp, synthetic construct
  misc_feature 1..51: note = Synthetic polynucleotide
  source 1..51: mol_type = other DNA
ttgctggctgacctgacgcgatctcygtctgacaacatcaacctgcctcag

SEQ ID NO: 2302 - DNA, 51 bp, synthetic construct
  misc_feature 1..51: note = Synthetic polynucleotide
  source 1..51: mol_type = other DNA
tgtagcttctaccgaaccagaacctygcaggcactgagtaatgagaagaaa

SEQ ID NO: 2303 - DNA, 51 bp, synthetic construct
  misc_feature 1..51: note = Synthetic polynucleotide
  source 1..51: mol_type = other DNA
aggtctctgaggttccaccaaaatayggaacttgattttggacactttgac

SEQ ID NO: 2304 - DNA, 51 bp, synthetic construct
  misc_feature 1..51: note = Synthetic polynucleotide
  source 1..51: mol_type = other DNA
tcttctctaatacttgatgttcctcygggtgtgatctcgagaattgaaaaa

SEQ ID NO: 2305 - DNA, 51 bp, synthetic construct
  misc_feature 1..51: note = Synthetic polynucleotide
  source 1..51: mol_type = other DNA
aactttctgacttaaccataggtgcygtcatggattcatccagaaaataag

SEQ ID NO: 2306 - DNA, 51 bp, synthetic construct
  misc_feature 1..51: note = Synthetic polynucleotide
  source 1..51: mol_type = other DNA
tcataatattcatgttatgcgggaayctttaaaaaaagtgaaggacattgt

SEQ ID NO: 2307 - DNA, 51 bp, synthetic construct
  misc_feature 1..51: note = Synthetic polynucleotide
  source 1..51: mol_type = other DNA
tgtgtgtggcaaatgtcaaaacaggyaaggaatatgagggatgaaaataca

SEQ ID NO: 2308 - DNA, 51 bp, synthetic construct
  misc_feature 1..51: note = Synthetic polynucleotide
  source 1..51: mol_type = other DNA
gtttttgtttagttccctacagcttytgaattcaatgaacaatttttgatt

SEQ ID NO: 2309 - DNA, 51 bp, synthetic construct
  misc_feature 1..51: note = Synthetic polynucleotide
  source 1..51: mol_type = other DNA
ctgtatagttgccgatttggtacttycttattcaactgtgaatctgctcga

SEQ ID NO: 2310 - DNA, 51 bp, synthetic construct
  misc_feature 1..51: note = Synthetic polynucleotide
  source 1..51: mol_type = other DNA
ggttacagaaaggactgtttctttayggtcactgataaacagtaataaaga

SEQ ID NO: 2311 - DNA, 51 bp, synthetic construct
  misc_feature 1..51: note = Synthetic polynucleotide
  source 1..51: mol_type = other DNA
tctcttcttttcttcagggaaagagyatgccaagggagacagccgatacat

SEQ ID NO: 2312 - DNA, 51 bp, synthetic construct
  misc_feature 1..51: note = Synthetic polynucleotide
  source 1..51: mol_type = other DNA
gagcctgcctgtgccacaggccgccygatcttcgacaacctaaagaagtcc

SEQ ID NO: 2313 - DNA, 51 bp, synthetic construct
  misc_feature 1..51: note = Synthetic polynucleotide
  source 1..51: mol_type = other DNA
gtggccctgtctcacatcgctgggcyctgcaatcgcgctgtcttcaagggt

SEQ ID NO: 2314 - DNA, 51 bp, synthetic construct
  misc_feature 1..51: note = Synthetic polynucleotide
  source 1..51: mol_type = other DNA
gaaccgcatgacagtcgcccacatgyggtttgacaaccagatccacgaggc

SEQ ID NO: 2315 - DNA, 51 bp, synthetic construct
  misc_feature 1..51: note = Synthetic polynucleotide
  source 1..51: mol_type = other DNA
atctgctcagataagacagggacccycactcagaaccgcatgacagtcgcc

SEQ ID NO: 2316 - DNA, 51 bp, synthetic construct
  misc_feature 1..51: note = Synthetic polynucleotide
  source 1..51: mol_type = other DNA
ctttctgtccttcatttcaggtcccygtgctgctggagttgtgggaatcaa

SEQ ID NO: 2317 - DNA, 51 bp, synthetic construct
  misc_feature 1..51: note = Synthetic polynucleotide
  source 1..51: mol_type = other DNA
gttcactgcatcttctttttctgaargccatgcactaaaaaggcactgcaa

SEQ ID NO: 2318 - DNA, 51 bp, synthetic construct
  misc_feature 1..51: note = Synthetic polynucleotide
  source 1..51: mol_type = other DNA
cagcaactaccccagctctgagaccyttgaggagatccagttttttaatgg

SEQ ID NO: 2319 - DNA, 51 bp, synthetic construct
  misc_feature 1..51: note = Synthetic polynucleotide
  source 1..51: mol_type = other DNA
ggtgtcacagcctccgttcattatcrtacattcatcaatatctgtgaaaac

SEQ ID NO: 2320 - DNA, 51 bp, synthetic construct
  misc_feature 1..51: note = Synthetic polynucleotide
  source 1..51: mol_type = other DNA
accttccaaactgaagcgctcctacycctccccagatataacccaggctat

SEQ ID NO: 2321 - DNA, 51 bp, synthetic construct
  misc_feature 1..51: note = Synthetic polynucleotide
  source 1..51: mol_type = other DNA
cctctttctgagggaaaggacaagaygaagtggaaggcgcttttcaccgcg

SEQ ID NO: 2322 - DNA, 51 bp, synthetic construct
  misc_feature 1..51: note = Synthetic polynucleotide
  source 1..51: mol_type = other DNA
aaatccattcgtttccgtcccacgcyggtcttcagggatcaccacgctcac

SEQ ID NO: 2323 - DNA, 51 bp, synthetic construct
  misc_feature 1..51: note = Synthetic polynucleotide
  source 1..51: mol_type = other DNA
acccacagacccaccttccagcagayctgctccttccttcaggagcaggcc

SEQ ID NO: 2324 - DNA, 51 bp, synthetic construct
  misc_feature 1..51: note = Synthetic polynucleotide
  source 1..51: mol_type = other DNA
cttggcctttgcagggctgaatcccyaccctggcatcctggtgaacagcaa

SEQ ID NO: 2325 - DNA, 51 bp, synthetic construct
  misc_feature 1..51: note = Synthetic polynucleotide
  source 1..51: mol_type = other DNA
gtgaagtggatggccccagagagcayctttgactgtgtctacacggttcag

SEQ ID NO: 2326 - DNA, 51 bp, synthetic construct
  misc_feature 1..51: note = Synthetic polynucleotide
  source 1..51: mol_type = other DNA
tggggactgtcatcccaggcccgccygcctgtgaagtggatggccccagag

SEQ ID NO: 2327 - DNA, 51 bp, synthetic construct
  misc_feature 1..51: note = Synthetic polynucleotide
  source 1..51: mol_type = other DNA
gaacatcgtcaaccttctgggagccygtacccatggaggtaagggccttgg

SEQ ID NO: 2328 - DNA, 51 bp, synthetic construct
  misc_feature 1..51: note = Synthetic polynucleotide
  source 1..51: mol_type = other DNA
aagtgggagttcccccggaacaaccygcagtttggtgagatggcagctcat

SEQ ID NO: 2329 - DNA, 51 bp, synthetic construct
  misc_feature 1..51: note = Synthetic polynucleotide
  source 1..51: mol_type = other DNA
aattcccaggagcacctggatcttcyccagcaggtgagcctaaacaccaca

SEQ ID NO: 2330 - DNA, 51 bp, synthetic construct
  misc_feature 1..51: note = Synthetic polynucleotide
  source 1..51: mol_type = other DNA
agcagcggtaggcccgggccccaccrtgactcttcagtgacagtttttctt

SEQ ID NO: 2331 - DNA, 51 bp, synthetic construct
  misc_feature 1..51: note = Synthetic polynucleotide
  misc_difference 26: note = n is a, c, g, t or u
  source 1..51: mol_type = other DNA
ggcaactccagcccccgaacccaggngagttgtctctgctttgtctccaaa

SEQ ID NO: 2332 - DNA, 51 bp, synthetic construct
  misc_feature 1..51: note = Synthetic polynucleotide
  source 1..51: mol_type = other DNA
agaaaccccctgtgcaccctgtgccyggaggagcgcaggcacccaacagcc

SEQ ID NO: 2333 - DNA, 51 bp, synthetic construct
  misc_feature 1..51: note = Synthetic polynucleotide
  source 1..51: mol_type = other DNA
tcgggaccacccgaacccgcggccayggccccggccgccgccagccccccg

SEQ ID NO: 2334 - DNA, 51 bp, synthetic construct
  misc_feature 1..51: note = Synthetic polynucleotide
  source 1..51: mol_type = other DNA
aatgcttctacaacatcagtagcatraaggaagtttcttgtttgaagccct

SEQ ID NO: 2335 - DNA, 51 bp, synthetic construct
  misc_feature 1..51: note = Synthetic polynucleotide
  source 1..51: mol_type = other DNA
gtgaaccttctcatccctttccaggygggactggcccccttccctgtcccc

SEQ ID NO: 2336 - DNA, 51 bp, synthetic construct
  misc_feature 1..51: note = Synthetic polynucleotide
  source 1..51: mol_type = other DNA
ctcatgtgcccccccagccaggctcdccctgcacaatgagctcagccagcg

SEQ ID NO: 2337 - DNA, 51 bp, synthetic construct
  misc_feature 1..51: note = Synthetic polynucleotide
  source 1..51: mol_type = other DNA
gcggccatccctgagggacagttcahtgatagcaggaagggggcagagaag

SEQ ID NO: 2338 - DNA, 51 bp, synthetic construct
  misc_feature 1..51: note = Synthetic polynucleotide
  source 1..51: mol_type = other DNA
tgccagcatggctgccagaacatcaytgggggctacaggtgcagctgcccc

SEQ ID NO: 2339 - DNA, 51 bp, synthetic construct
  misc_feature 1..51: note = Synthetic polynucleotide
  source 1..51: mol_type = other DNA
ggctgctgatgacacctgggagccayttgcctctgggtaagttgccaaaga

SEQ ID NO: 2340 - DNA, 51 bp, synthetic construct
  misc_feature 1..51: note = Synthetic polynucleotide
  source 1..51: mol_type = other DNA
gaggttgcggcggaagcggagaccaygttccgagcggcggctccggggcag

SEQ ID NO: 2341 - DNA, 51 bp, synthetic construct
  misc_feature 1..51: note = Synthetic polynucleotide
  source 1..51: mol_type = other DNA
gcgggccgggcgcggggaggtgtcaygcgccggaacctgcgcttggggcca

SEQ ID NO: 2342 - DNA, 51 bp, synthetic construct
  misc_feature 1..51: note = Synthetic polynucleotide
  source 1..51: mol_type = other DNA
ctcagtgctgagcccatctgaggccygtggcctgctcctgggctccacctg

SEQ ID NO: 2343 - DNA, 51 bp, synthetic construct
  misc_feature 1..51: note = Synthetic polynucleotide
  source 1..51: mol_type = other DNA
ttcctggaattggaggcatcgcaggyaacatctgtcccagcagggggcggg

SEQ ID NO: 2344 - DNA, 51 bp, synthetic construct
  misc_feature 1..51: note = Synthetic polynucleotide
  source 1..51: mol_type = other DNA
tggacatcttttaaccaggagagaaytgttgatgttgctggaccagggggt

SEQ ID NO: 2345 - DNA, 51 bp, synthetic construct
  misc_feature 1..51: note = Synthetic polynucleotide
  source 1..51: mol_type = other DNA
gagcacccctgcctggtggagctgcygtcccatgtgctgaaagtccaggac

SEQ ID NO: 2346 - DNA, 51 bp, synthetic construct
  misc_feature 1..51: note = Synthetic polynucleotide
  source 1..51: mol_type = other DNA
ctctacgggtctcaccctttctaccbggcgctggaggacggcgggtcggca

SEQ ID NO: 2347 - DNA, 51 bp, synthetic construct
  misc_feature 1..51: note = Synthetic polynucleotide
  source 1..51: mol_type = other DNA
aatgtgtcccagggtattttattacytctcatgttaaaacaacatttgaag

SEQ ID NO: 2348 - DNA, 51 bp, synthetic construct
  misc_feature 1..51: note = Synthetic polynucleotide
  source 1..51: mol_type = other DNA
attctttagcttcaaggcgtagtcadtgtcactggtggtgagcttctgccg

SEQ ID NO: 2349 - DNA, 51 bp, synthetic construct
  misc_feature 1..51: note = Synthetic polynucleotide
  source 1..51: mol_type = other DNA
attgacaatgggaagcagcgtgagtytgagagccggctggcggatgcgctg

SEQ ID NO: 2350 - DNA, 51 bp, synthetic construct
  misc_feature 1..51: note = Synthetic polynucleotide
  source 1..51: mol_type = other DNA
ggactggatccacagcaacatctacyggaccgactctgtcctgggcactgt

SEQ ID NO: 2351 - DNA, 51 bp, synthetic construct
  misc_feature 1..51: note = Synthetic polynucleotide
  source 1..51: mol_type = other DNA
catgaacaattctccatttgacttaygtcatgttttgttatctttattaga

SEQ ID NO: 2352 - DNA, 51 bp, synthetic construct
  misc_feature 1..51: note = Synthetic polynucleotide
  source 1..51: mol_type = other DNA
cttacagggcgaggcacggtgtgagygccgcctggaggtgcgaggtgagga

SEQ ID NO: 2353 - DNA, 51 bp, synthetic construct
  misc_feature 1..51: note = Synthetic polynucleotide
  source 1..51: mol_type = other DNA
ttcagcaagcagggagtgttgactcyggagattagaaagccctgccccttt

SEQ ID NO: 2354 - DNA, 51 bp, synthetic construct
  misc_feature 1..51: note = Synthetic polynucleotide
  source 1..51: mol_type = other DNA
cagaaagccgacaagaagaccatggbgagcccagggtctggggtccccacg

SEQ ID NO: 2355 - DNA, 51 bp, synthetic construct
  misc_feature 1..51: note = Synthetic polynucleotide
  source 1..51: mol_type = other DNA
cgcaaaggaccaggcggtgttcaaaygtgaggtctcagatgagaatgttcg

SEQ ID NO: 2356 - DNA, 51 bp, synthetic construct
  misc_feature 1..51: note = Synthetic polynucleotide
  source 1..51: mol_type = other DNA
atcggaggagggggcgcaagtcaaabggtgagttccagaagcacggggcat

SEQ ID NO: 2357 - DNA, 51 bp, synthetic construct
  misc_feature 1..51: note = Synthetic polynucleotide
  source 1..51: mol_type = other DNA
tgcccagcctgccttcactggcagcyaccgctgtgaggtgtccaccaagga

SEQ ID NO: 2358 - DNA, 51 bp, synthetic construct
  misc_feature 1..51: note = Synthetic polynucleotide
  source 1..51: mol_type = other DNA
ggagcccccgatgaccccattggccycttcgtgatgcggccacaggatggc

SEQ ID NO: 2359 - DNA, 51 bp, synthetic construct
  misc_feature 1..51: note = Synthetic polynucleotide
  source 1..51: mol_type = other DNA
gatgctgaggagcgctgtgatcagcygatcaaaaacaagattcagctggag

SEQ ID NO: 2360 - DNA, 51 bp, synthetic construct
  misc_feature 1..51: note = Synthetic polynucleotide
  source 1..51: mol_type = other DNA
tcgggccttcatgggggtcaagaatyggccctggatgaagctctacttcaa

SEQ ID NO: 2361 - DNA, 51 bp, synthetic construct
  misc_feature 1..51: note = Synthetic polynucleotide
  source 1..51: mol_type = other DNA
gtcctggacatcgctggcttcgagaycttcgatgtgagttgggacccctgg

SEQ ID NO: 2362 - DNA, 51 bp, synthetic construct
  misc_feature 1..51: note = Synthetic polynucleotide
  source 1..51: mol_type = other DNA
cacttcagaggagaaaaactccatgyataagctgacaggcgccatcatgca

SEQ ID NO: 2363 - DNA, 51 bp, synthetic construct
  misc_feature 1..51: note = Synthetic polynucleotide
  source 1..51: mol_type = other DNA
cgtccggaacgacaactcctcccgcytcgtgagtggtccctgaccttggcc

SEQ ID NO: 2364 - DNA, 51 bp, synthetic construct
  misc_feature 1..51: note = Synthetic polynucleotide
  source 1..51: mol_type = other DNA
ctgcctgatggccaagtcatcactaytggcaatgagcgcttccgctgtcct

SEQ ID NO: 2365 - DNA, 51 bp, synthetic construct
  misc_feature 1..51: note = Synthetic polynucleotide
  misc_difference 26: note = n is a, c, g, t or u
  source 1..51: mol_type = other DNA
gcagcagaagaagcggctggaagccnttctcacccagaaagccaaggtcgg

SEQ ID NO: 2366 - DNA, 51 bp, synthetic construct
  misc_feature 1..51: note = Synthetic polynucleotide
  source 1..51: mol_type = other DNA
ccagaactacatctgggctgcgcgcytgcgcttcgcttcctggccctcgtt

SEQ ID NO: 2367 - DNA, 51 bp, synthetic construct
  misc_feature 1..51: note = Synthetic polynucleotide
  source 1..51: mol_type = other DNA
tatctagactttgtctttgctgtggygagtaacagattttttaaagttagg

SEQ ID NO: 2368 - DNA, 51 bp, synthetic construct
  misc_feature 1..51: note = Synthetic polynucleotide
  source 1..51: mol_type = other DNA
tcgcgcgagccctcccaggtcatctyctgcaatcgcagtccgcgcgtcgtg

SEQ ID NO: 2369 - DNA, 51 bp, synthetic construct
  misc_feature 1..51: note = Synthetic polynucleotide
  source 1..51: mol_type = other DNA
ccgcgcgtcgtgctgcccgtatggchcaacttcgacggcgagccgcagccc

SEQ ID NO: 2370 - DNA, 51 bp, synthetic construct
  misc_feature 1..51: note = Synthetic polynucleotide
  source 1..51: mol_type = other DNA
gtttttgcccttccagtgtatactchgaaagagcgatgcctccaggttgtc

SEQ ID NO: 2371 - DNA, 51 bp, synthetic construct
  misc_feature 1..51: note = Synthetic polynucleotide
  source 1..51: mol_type = other DNA
gcagtgtagctacttcttctattggyaatcttcttgtacatatagtagatt

SEQ ID NO: 2372 - DNA, 51 bp, synthetic construct
  misc_feature 1..51: note = Synthetic polynucleotide
  source 1..51: mol_type = other DNA
aggtgttggaaaaacacaattatggyaaaataaagtgttctccttttaagg

SEQ ID NO: 2373 - DNA, 51 bp, synthetic construct
  misc_feature 1..51: note = Synthetic polynucleotide
  source 1..51: mol_type = other DNA
cacaaggacatcaagccggggaaccygctgctcaccaccggtggcaccctc

SEQ ID NO: 2374 - DNA, 51 bp, synthetic construct
  misc_feature 1..51: note = Synthetic polynucleotide
  source 1..51: mol_type = other DNA
ggacaacacgcaggtgcccagctacygcctgaatgcacgcggcgagggggc

SEQ ID NO: 2375 - DNA, 51 bp, synthetic construct
  misc_feature 1..51: note = Synthetic polynucleotide
  source 1..51: mol_type = other DNA
actgaagggatctgcaggaatcgtgygactaataatgtaaaagacgtcact

SEQ ID NO: 2376 - DNA, 51 bp, synthetic construct
  misc_feature 1..51: note = Synthetic polynucleotide
  source 1..51: mol_type = other DNA
gcagtgcctgcagcgccggcggcgaygcggtcagttctgttcacccggacc

SEQ ID NO: 2377 - DNA, 51 bp, synthetic construct
  misc_feature 1..51: note = Synthetic polynucleotide
  source 1..51: mol_type = other DNA
tagtgaagaagaaatccgtgaggcaytccgagtctttgacaaggtaatcca

SEQ ID NO: 2378 - DNA, 51 bp, synthetic construct
  misc_feature 1..51: note = Synthetic polynucleotide
  source 1..51: mol_type = other DNA
gaagatagaaagaatattctcaggcytcaagatttggtagataaacttcag

SEQ ID NO: 2379 - DNA, 51 bp, synthetic construct
  misc_feature 1..51: note = Synthetic polynucleotide
  source 1..51: mol_type = other DNA
ctacgagtgcattctctgtgcctgcygtagcaccagctgccccagctactg

SEQ ID NO: 2380 - DNA, 51 bp, synthetic construct
  misc_feature 1..51: note = Synthetic polynucleotide
  source 1..51: mol_type = other DNA
aaagggacgaactggtgtaatgataygtgcatatttattacatcggggcaa

SEQ ID NO: 2381 - DNA, 51 bp, synthetic construct
  misc_feature 1..51: note = Synthetic polynucleotide
  source 1..51: mol_type = other DNA
atgtgtgttctgaaattgtgaaccaygagtctagtacttaatgatctgctt

SEQ ID NO: 2382 - DNA, 51 bp, synthetic construct
  misc_feature 1..51: note = Synthetic polynucleotide
  source 1..51: mol_type = other DNA
ggtcctggaaaaaagcttgggagttyggttgtatttactgccagcctcttg

SEQ ID NO: 2383 - DNA, 51 bp, synthetic construct
  misc_feature 1..51: note = Synthetic polynucleotide
  source 1..51: mol_type = other DNA
tatgtgtattattatagctacctgtyaaagaatcatctggattatagacca

SEQ ID NO: 2384 - DNA, 51 bp, synthetic construct
  misc_feature 1..51: note = Synthetic polynucleotide
  source 1..51: mol_type = other DNA
acgcagggcgtcaggacgcagggtcrtggagcctccgtttctctcgcattc

SEQ ID NO: 2385 - DNA, 51 bp, synthetic construct
  misc_feature 1..51: note = Synthetic polynucleotide
  source 1..51: mol_type = other DNA
aacctggtggacaatgacttcccacyggacaactgcctctggcaggtggtg

SEQ ID NO: 2386 - DNA, 51 bp, synthetic construct
  misc_feature 1..51: note = Synthetic polynucleotide
  source 1..51: mol_type = other DNA
ctgtggattgagcggtggggaaagcygtatgaggaggagtccccgtcccgc

SEQ ID NO: 2387 - DNA, 51 bp, synthetic construct
  misc_feature 1..51: note = Synthetic polynucleotide
  source 1..51: mol_type = other DNA
agcgggggctatgtcttccagaaggygtggtagggaggcacggggtgcccc

SEQ ID NO: 2388 - DNA, 51 bp, synthetic construct
  misc_feature 1..51: note = Synthetic polynucleotide
  source 1..51: mol_type = other DNA
cctggagaccatcctgcacatgaccygctgccgtcagcgcctggaggagat

SEQ ID NO: 2389 - DNA, 51 bp, synthetic construct
  misc_feature 1..51: note = Synthetic polynucleotide
  source 1..51: mol_type = other DNA
aacccctggacggccgggatcattgygagtgtattataaggggctttgtgg

SEQ ID NO: 2390 - DNA, 51 bp, synthetic construct
  misc_feature 1..51: note = Synthetic polynucleotide
  source 1..51: mol_type = other DNA
gtgctggagcctggggactccttccyggttggggccaatggcatttggggg

SEQ ID NO: 2391 - DNA, 51 bp, synthetic construct
  misc_feature 1..51: note = Synthetic polynucleotide
  source 1..51: mol_type = other DNA
cttcctggttggggccaatggcattygggggcagcgagccgtggacatcgg

SEQ ID NO: 2392 - DNA, 51 bp, synthetic construct
  misc_feature 1..51: note = Synthetic polynucleotide
  source 1..51: mol_type = other DNA
actcggcagaggctggtgctggagaytggggacccagaaggtacctctagc

SEQ ID NO: 2393 - DNA, 51 bp, synthetic construct
  misc_feature 1..51: note = Synthetic polynucleotide
  source 1..51: mol_type = other DNA
cgccatcgccgcggagccggcggccracagccctttctgcagcggggaggt

SEQ ID NO: 2394 - DNA, 51 bp, synthetic construct
  misc_feature 1..51: note = Synthetic polynucleotide
  source 1..51: mol_type = other DNA
gtatacatacccagtggccacccagygtcactgtggcaagtgtgacagcga

SEQ ID NO: 2395 - DNA, 51 bp, synthetic construct
  misc_feature 1..51: note = Synthetic polynucleotide
  source 1..51: mol_type = other DNA
cgcctgggtcgcttcctctggtcgcygcccgtggcccctgcggcctgcgag

SEQ ID NO: 2396 - DNA, 51 bp, synthetic construct
  misc_feature 1..51: note = Synthetic polynucleotide
  source 1..51: mol_type = other DNA
aaagcataaaaaccattacaagatahacaatctgtaagtatgttttcttat

SEQ ID NO: 2397 - DNA, 51 bp, synthetic construct
  misc_feature 1..51: note = Synthetic polynucleotide
  source 1..51: mol_type = other DNA
gagaagcacctggatattcctaaaaygttggatgctgaaggtgagatgaaa

SEQ ID NO: 2398 - DNA, 51 bp, synthetic construct
  misc_feature 1..51: note = Synthetic polynucleotide
  source 1..51: mol_type = other DNA
gcagaactccatccgccacaatctgyccctcaacaagtgcttcgtgaaggt

SEQ ID NO: 2399 - DNA, 51 bp, synthetic construct
  misc_feature 1..51: note = Synthetic polynucleotide
  source 1..51: mol_type = other DNA
attccatccatcatgaatgtgcttcyggtttgtcttatattctggctaatt

SEQ ID NO: 2400 - DNA, 51 bp, synthetic construct
  misc_feature 1..51: note = Synthetic polynucleotide
  source 1..51: mol_type = other DNA
gctctgggaaatttaaccctcgtctyggccatcatcgtcttcatttttgcc

SEQ ID NO: 2401 - DNA, 51 bp, synthetic construct
  misc_feature 1..51: note = Synthetic polynucleotide
  source 1..51: mol_type = other DNA
ctaataaatttgatcctggctgtgghggccatggcctacgaggaacagaat

SEQ ID NO: 2402 - DNA, 51 bp, synthetic construct
  misc_feature 1..51: note = Synthetic polynucleotide
  source 1..51: mol_type = other DNA
tttcttttaccccacttgcagccaaygtccagagggatatatgtgtgtgaa

SEQ ID NO: 2403 - DNA, 51 bp, synthetic construct
  misc_feature 1..51: note = Synthetic polynucleotide
  source 1..51: mol_type = other DNA
agatgtaatgatcctgactgtgttcygtctgagcgtatttgctctaattgg

SEQ ID NO: 2404 - DNA, 51 bp, synthetic construct
  misc_feature 1..51: note = Synthetic polynucleotide
  source 1..51: mol_type = other DNA
ttccggttcagtgccacctctgcccygtacattttaactcccttcaatcct

SEQ ID NO: 2405 - DNA, 51 bp, synthetic construct
  misc_feature 1..51: note = Synthetic polynucleotide
  source 1..51: mol_type = other DNA
gcagaatcagaaccagctcttttgayagggagcaagcagttcgggctttca

SEQ ID NO: 2406 - DNA, 51 bp, synthetic construct
  misc_feature 1..51: note = Synthetic polynucleotide
  source 1..51: mol_type = other DNA
gtctgtgacatttcctgttgtgaagyaaaagagggacccctgcgtcctgct

SEQ ID NO: 2407 - DNA, 51 bp, synthetic construct
  misc_feature 1..51: note = Synthetic polynucleotide
  source 1..51: mol_type = other DNA
ctttgggattacgtctatcagttgcyttctgacagccggtacgaaaacttc

SEQ ID NO: 2408 - DNA, 51 bp, synthetic construct
  misc_feature 1..51: note = Synthetic polynucleotide
  source 1..51: mol_type = other DNA
atgaacatcattgacattgtggccaycatcccctacttcatcaccctgggg

SEQ ID NO: 2409 - DNA, 51 bp, synthetic construct
  misc_feature 1..51: note = Synthetic polynucleotide
  source 1..51: mol_type = other DNA
gtgtcccccacctagtttgcagaccygacagacgctgctgcccgcaacgcg

SEQ ID NO: 2410 - DNA, 51 bp, synthetic construct
  misc_feature 1..51: note = Synthetic polynucleotide
  source 1..51: mol_type = other DNA
gagatgatggagctcaatgaccgctytgccagctacatcgagaaggttcgc

SEQ ID NO: 2411 - DNA, 51 bp, synthetic construct
  misc_feature 1..51: note = Synthetic polynucleotide
  source 1..51: mol_type = other DNA
acccgggccagtgagcgggcagagadgatggagctcaatgaccgctttgcc

SEQ ID NO: 2412 - DNA, 51 bp, synthetic construct
  misc_feature 1..51: note = Synthetic polynucleotide
  source 1..51: mol_type = other DNA
tttgcctgatgcccatgatgcagacyctggtaagaacgagctccttgggcc

SEQ ID NO: 2413 - DNA, 51 bp, synthetic construct
  misc_feature 1..51: note = Synthetic polynucleotide
  source 1..51: mol_type = other DNA
tcccggaagctggcggagcaggagcygattgagactagtgagcgggtgcag

SEQ ID NO: 2414 - DNA, 51 bp, synthetic construct
  misc_feature 1..51: note = Synthetic polynucleotide
  source 1..51: mol_type = other DNA
atggaacaggccaagcgcaaccaccwgcgggtggtggactcgctgcagacc

SEQ ID NO: 2415 - DNA, 51 bp, synthetic construct
  misc_feature 1..51: note = Synthetic polynucleotide
  source 1..51: mol_type = other DNA
tgagtcttgatgaagcctacttgaayataacaaagcacttagaagaaagac

SEQ ID NO: 2416 - DNA, 51 bp, synthetic construct
  misc_feature 1..51: note = Synthetic polynucleotide
  source 1..51: mol_type = other DNA
tattttataatcaatgaatttgttcyttctgattttaagtttgcagattta

SEQ ID NO: 2417 - DNA, 51 bp, synthetic construct
  misc_feature 1..51: note = Synthetic polynucleotide
  source 1..51: mol_type = other DNA
agtcctgggggccagtctgttgtgcyaggaagttatgacaggtaagtcccc

SEQ ID NO: 2418 - DNA, 51 bp, synthetic construct
  misc_feature 1..51: note = Synthetic polynucleotide
  source 1..51: mol_type = other DNA
gacatctgctgctttcatattttcayacattactgcagtaacactccacca

SEQ ID NO: 2419 - DNA, 51 bp, synthetic construct
  misc_feature 1..51: note = Synthetic polynucleotide
  source 1..51: mol_type = other DNA
ctcttcctagctgaggtggtgctgcyctgctgggtcaagttcttgcccctc

SEQ ID NO: 2420 - DNA, 51 bp, synthetic construct
  misc_feature 1..51: note = Synthetic polynucleotide
  source 1..51: mol_type = other DNA
gagttctacctcagtctaatcctgcygcagaactatcaggtacttagattc

SEQ ID NO: 2421 - DNA, 51 bp, synthetic construct
  misc_feature 1..51: note = Synthetic polynucleotide
  source 1..51: mol_type = other DNA
aaactggccttcagtgagttctaccycagtctaatcctgctgcagaactat

SEQ ID NO: 2422 - DNA, 51 bp, synthetic construct
  misc_feature 1..51: note = Synthetic polynucleotide
  source 1..51: mol_type = other DNA
gacagacaaaaggctatgaagcgttyacgtgtcccccctttgggagctgct

SEQ ID NO: 2423 - DNA, 51 bp, synthetic construct
  misc_feature 1..51: note = Synthetic polynucleotide
  source 1..51: mol_type = other DNA
cgggtggacatccagaacaagcgctyctacctggacgtgaagcagaacgcc

SEQ ID NO: 2424 - DNA, 51 bp, synthetic construct
  misc_feature 1..51: note = Synthetic polynucleotide
  source 1..51: mol_type = other DNA
ctgggctccacgcagggccagaccaytgcgctgcccgcgcaggggctcatc

SEQ ID NO: 2425 - DNA, 51 bp, synthetic construct
  misc_feature 1..51: note = Synthetic polynucleotide
  source 1..51: mol_type = other DNA
tctgactcccaggacgggcaccaggkgagtcacctagtaggggcggcggcg

SEQ ID NO: 2426 - DNA, 51 bp, synthetic construct
  misc_feature 1..51: note = Synthetic polynucleotide
  source 1..51: mol_type = other DNA
tccaggggacccaagggctacaaggygagcgtgggctgctgggagggggga

SEQ ID NO: 2427 - DNA, 51 bp, synthetic construct
  misc_feature 1..51: note = Synthetic polynucleotide
  source 1..51: mol_type = other DNA
tcactctcaggagaccattgcatcaytggccgcacactggtggtaagtttt

SEQ ID NO: 2428 - DNA, 51 bp, synthetic construct
  misc_feature 1..51: note = Synthetic polynucleotide
  source 1..51: mol_type = other DNA
cttctactacactgtgatgttccggygagtgggccacactggctggcctgg

SEQ ID NO: 2429 - DNA, 51 bp, synthetic construct
  misc_feature 1..51: note = Synthetic polynucleotide
  source 1..51: mol_type = other DNA
ggtctagactatcagaatccataccygagtccatttagagagttccaaagg

SEQ ID NO: 2430 - DNA, 51 bp, synthetic construct
  misc_feature 1..51: note = Synthetic polynucleotide
  source 1..51: mol_type = other DNA
cagctgtggactccaggggggtaggytgccacagtggcttcttccaccaag

SEQ ID NO: 2431 - DNA, 51 bp, synthetic construct
  misc_feature 1..51: note = Synthetic polynucleotide
  source 1..51: mol_type = other DNA
ttcacagggattttcacagcagagabgaccttcaagatcattgccctcgac

SEQ ID NO: 2432 - DNA, 51 bp, synthetic construct
  misc_feature 1..51: note = Synthetic polynucleotide
  source 1..51: mol_type = other DNA
agagttagaggagtctcgccacaagbgtccaccatgctggaaccgtctcgc

SEQ ID NO: 2433 - DNA, 51 bp, synthetic construct
  misc_feature 1..51: note = Synthetic polynucleotide
  source 1..51: mol_type = other DNA
gaaaagcagaggacccaggaagagcygaggaggctctcttctgaggtcgag

SEQ ID NO: 2434 - DNA, 51 bp, synthetic construct
  misc_feature 1..51: note = Synthetic polynucleotide
  source 1..51: mol_type = other DNA
cggggcgacgtcgtcgtggccatccygggtatggggtggggggcgggcact

SEQ ID NO: 2435 - DNA, 51 bp, synthetic construct
  misc_feature 1..51: note = Synthetic polynucleotide
  source 1..51: mol_type = other DNA
ttcatctcccggggctccatcgagaycctgcggggcgacgtcgtcgtggcc

SEQ ID NO: 2436 - DNA, 51 bp, synthetic construct
  misc_feature 1..51: note = Synthetic polynucleotide
  source 1..51: mol_type = other DNA
ctgcgtcatgctcattggctgtgagygtgcccaggggcgggcggcggggag

SEQ ID NO: 2437 - DNA, 51 bp, synthetic construct
  misc_feature 1..51: note = Synthetic polynucleotide
  source 1..51: mol_type = other DNA
tcccaacaccaactcagagaagatcbtctccatctgcgtcatgctcattgg

SEQ ID NO: 2438 - DNA, 51 bp, synthetic construct
  misc_feature 1..51: note = Synthetic polynucleotide
  source 1..51: mol_type = other DNA
ctacacggctgtcttcacaccctacycggctgccttcctgctgaaggagac

SEQ ID NO: 2439 - DNA, 51 bp, synthetic construct
  misc_feature 1..51: note = Synthetic polynucleotide
  source 1..51: mol_type = other DNA
gctcgggtggagaactgcgccgtcahctactgcaacgacggcttctgcgag

SEQ ID NO: 2440 - DNA, 51 bp, synthetic construct
  misc_feature 1..51: note = Synthetic polynucleotide
  source 1..51: mol_type = other DNA
gtctttgccatctccttctttgcgcycccagcggtaggtgccccgtgggtg

SEQ ID NO: 2441 - DNA, 51 bp, synthetic construct
  misc_feature 1..51: note = Synthetic polynucleotide
  source 1..51: mol_type = other DNA
cccaaacccaagaagtctgtggtggygagtagcccacctgccaccagggca

SEQ ID NO: 2442 - DNA, 51 bp, synthetic construct
  misc_feature 1..51: note = Synthetic polynucleotide
  source 1..51: mol_type = other DNA
cctcgccctgtctgaggatcatgccygggtagtgtttgggcccaatgggga

SEQ ID NO: 2443 - DNA, 51 bp, synthetic construct
  misc_feature 1..51: note = Synthetic polynucleotide
  source 1..51: mol_type = other DNA
caccattggcggcttcacatgcaaaygtcctcccggatttacccaacacca

SEQ ID NO: 2444 - DNA, 51 bp, synthetic construct
  misc_feature 1..51: note = Synthetic polynucleotide
  source 1..51: mol_type = other DNA
atgctgctgtgacggagggagaggcyggggtccccactgtgagatctgccc

SEQ ID NO: 2445 - DNA, 51 bp, synthetic construct
  misc_feature 1..51: note = Synthetic polynucleotide
  source 1..51: mol_type = other DNA
ctgctgtgccttgaagggagaaggcyggggagacccctgcgagctctgccc

SEQ ID NO: 2446 - DNA, 51 bp, synthetic construct
  misc_feature 1..51: note = Synthetic polynucleotide
  source 1..51: mol_type = other DNA
cacaattggttccttcaactgccgcygcaatcatggtttcatcctttctca

SEQ ID NO: 2447 - DNA, 51 bp, synthetic construct
  misc_feature 1..51: note = Synthetic polynucleotide
  source 1..51: mol_type = other DNA
gggaatggaacttgccggaacacaaytggttccttcaactgccgctgcaat

SEQ ID NO: 2448 - DNA, 51 bp, synthetic construct
  misc_feature 1..51: note = Synthetic polynucleotide
  source 1..51: mol_type = other DNA
tggacctccgtggggagtgtattggyacgtgatccatcctaggttggcacc

SEQ ID NO: 2449 - DNA, 51 bp, synthetic construct
  misc_feature 1..51: note = Synthetic polynucleotide
  source 1..51: mol_type = other DNA
tctcattgaaactacagcctctgccygttacacattgaacaacataatcca

SEQ ID NO: 2450 - DNA, 51 bp, synthetic construct
  misc_feature 1..51: note = Synthetic polynucleotide
  source 1..51: mol_type = other DNA
agacctcacagtaaaaataggtgatyttggtctagctacagtgaaatctcg

SEQ ID NO: 2451 - DNA, 51 bp, synthetic construct
  misc_feature 1..51: note = Synthetic polynucleotide
  source 1..51: mol_type = other DNA
gccgtgtgccaatccattgtccaccyctttgaggatgacatggtggaggtg

SEQ ID NO: 2452 - DNA, 51 bp, synthetic construct
  misc_feature 1..51: note = Synthetic polynucleotide
  source 1..51: mol_type = other DNA
gaagcagataccccaggaattcagahtgggagaaaggtaaagtatttatta

SEQ ID NO: 2453 - DNA, 51 bp, synthetic construct
  misc_feature 1..51: note = Synthetic polynucleotide
  source 1..51: mol_type = other DNA
aggaggacctgcttacaatggaatgyaaactgcagctagccagtttctttc

SEQ ID NO: 2454 - DNA, 51 bp, synthetic construct
  misc_feature 1..51: note = Synthetic polynucleotide
  source 1..51: mol_type = other DNA
gccattctggagctggcctatacttyagcagatggattggagtactctaga

SEQ ID NO: 2455 - DNA, 51 bp, synthetic construct
  misc_feature 1..51: note = Synthetic polynucleotide
  source 1..51: mol_type = other DNA
agacctcactcccggggagccagcabgtccactgcggtcctggaaaaccca

SEQ ID NO: 2456 - DNA, 51 bp, synthetic construct
  misc_feature 1..51: note = Synthetic polynucleotide
  source 1..51: mol_type = other DNA
ggcagccatggccaagctggccgccycggaggccgcgaccgccatcagcca

SEQ ID NO: 2457 - DNA, 51 bp, synthetic construct
  misc_feature 1..51: note = Synthetic polynucleotide
  source 1..51: mol_type = other DNA
gcgtattgggcatcacagcccctggygagtatagtgtctttccctaaaaag

SEQ ID NO: 2458 - DNA, 51 bp, synthetic construct
  misc_feature 1..51: note = Synthetic polynucleotide
  source 1..51: mol_type = other DNA
cgagcggcaggttgggtgcggaccayggcctctcacaagctgctggtgacc

SEQ ID NO: 2459 - DNA, 51 bp, synthetic construct
  misc_feature 1..51: note = Synthetic polynucleotide
  source 1..51: mol_type = other DNA
ctctccatccccaaccagctcctgcyggggcctggtccttccaacctgcct

SEQ ID NO: 2460 - DNA, 51 bp, synthetic construct
  misc_feature 1..51: note = Synthetic polynucleotide
  source 1..51: mol_type = other DNA
ggcctggcccagcacaagccagtgcygctgttcttaacccacggggagtcg

SEQ ID NO: 2461 - DNA, 51 bp, synthetic construct
  misc_feature 1..51: note = Synthetic polynucleotide
  source 1..51: mol_type = other DNA
tcgtccaccggcgtgctgcagcccchtgatggcttcggggaactctgccac

SEQ ID NO: 2462 - DNA, 51 bp, synthetic construct
  misc_feature 1..51: note = Synthetic polynucleotide
  source 1..51: mol_type = other DNA
cgcccctccagggacctcgctcatcyccttcagtgacaaggccaagtgagt

SEQ ID NO: 2463 - DNA, 51 bp, synthetic construct
  misc_feature 1..51: note = Synthetic polynucleotide
  source 1..51: mol_type = other DNA
caagtggctggccaacttctggggcygtgacgaccagcccaggatgtgagg

SEQ ID NO: 2464 - DNA, 51 bp, synthetic construct
  misc_feature 1..51: note = Synthetic polynucleotide
  source 1..51: mol_type = other DNA
catcacacaatccccgtcatcagccygtacagcctgagagagagcctggcc

SEQ ID NO: 2465 - DNA, 51 bp, synthetic construct
  misc_feature 1..51: note = Synthetic polynucleotide
  source 1..51: mol_type = other DNA
ccagcgccatctcccacacagggccyggagaacagctggcgccagcaccgc

SEQ ID NO: 2466 - DNA, 51 bp, synthetic construct
  misc_feature 1..51: note = Synthetic polynucleotide
  source 1..51: mol_type = other DNA
cagcaccgcgaggccgcggcgtatcygcatgggcgcctgcaggcactgggg

SEQ ID NO: 2467 - DNA, 51 bp, synthetic construct
  misc_feature 1..51: note = Synthetic polynucleotide
  source 1..51: mol_type = other DNA
tgagccaggcccctcctgcaggcgcyccggcttcccacagtcaccactgtg

SEQ ID NO: 2468 - DNA, 51 bp, synthetic construct
  misc_feature 1..51: note = Synthetic polynucleotide
  source 1..51: mol_type = other DNA
agcccgccctgtgccccccaggtgcygcggatcggcctgctgggctgcaat

SEQ ID NO: 2469 - DNA, 51 bp, synthetic construct
  misc_feature 1..51: note = Synthetic polynucleotide
  source 1..51: mol_type = other DNA
gtgacggaggccctgagggcggcccygcagcactgccccaagaagaagctg

SEQ ID NO: 2470 - DNA, 51 bp, synthetic construct
  misc_feature 1..51: note = Synthetic polynucleotide
  source 1..51: mol_type = other DNA
tccgaccacgtggacaagaggatccyggatgctgcaggtgcacactgggtg

SEQ ID NO: 2471 - DNA, 51 bp, synthetic construct
  misc_feature 1..51: note = Synthetic polynucleotide
  source 1..51: mol_type = other DNA
ctggctggcctgagaggggagccgabgcctagtgaactcaagctgtagcca

SEQ ID NO: 2472 - DNA, 51 bp, synthetic construct
  misc_feature 1..51: note = Synthetic polynucleotide
  source 1..51: mol_type = other DNA
gtcccagccaacacagggctggaccygcctgtggatgcagtggtcacgctt

SEQ ID NO: 2473 - DNA, 51 bp, synthetic construct
  misc_feature 1..51: note = Synthetic polynucleotide
  source 1..51: mol_type = other DNA
gggatcccagggctgaagaaaatcayggactggtttggctactatggaggc

SEQ ID NO: 2474 - DNA, 51 bp, synthetic construct
  misc_feature 1..51: note = Synthetic polynucleotide
  source 1..51: mol_type = other DNA
ttcttgactgatgcctcctggagcaytggggacgataattttaacaaagtt

SEQ ID NO: 2475 - DNA, 51 bp, synthetic construct
  misc_feature 1..51: note = Synthetic polynucleotide
  source 1..51: mol_type = other DNA
cctgtgcaagaagcgcaatgaccacytcggccactatgtgtgccagccaga

SEQ ID NO: 2476 - DNA, 51 bp, synthetic construct
  misc_feature 1..51: note = Synthetic polynucleotide
  source 1..51: mol_type = other DNA
ccagggggccaactatgcttgtgaaygtccccccaacttcaccggctccaa

SEQ ID NO: 2477 - DNA, 51 bp, synthetic construct
  misc_feature 1..51: note = Synthetic polynucleotide
  source 1..51: mol_type = other DNA
tcagagcttttggaaaaacatggacycgagaaaccaatttcatttgttaaa

SEQ ID NO: 2478 - DNA, 51 bp, synthetic construct
  misc_feature 1..51: note = Synthetic polynucleotide
  source 1..51: mol_type = other DNA
gcctccttccagggccagcccttcayctggtgcatgctgcacaactttggg

SEQ ID NO: 2479 - DNA, 51 bp, synthetic construct
  misc_feature 1..51: note = Synthetic polynucleotide
  source 1..51: mol_type = other DNA
tctacagtttcgtctccaggtcagaygcactcggaacccccatgctgctaa

SEQ ID NO: 2480 - DNA, 51 bp, synthetic construct
  misc_feature 1..51: note = Synthetic polynucleotide
  source 1..51: mol_type = other DNA
ccagggcatatatggctatcatcatyatatgcaggatcgcatagatgacaa

SEQ ID NO: 2481 - DNA, 51 bp, synthetic construct
  misc_feature 1..51: note = Synthetic polynucleotide
  source 1..51: mol_type = other DNA
ccgcggtcatgtgacacagcgaagayggcgtcgcccggctgcctgtggctc

SEQ ID NO: 2482 - DNA, 51 bp, synthetic construct
  misc_feature 1..51: note = Synthetic polynucleotide
  source 1..51: mol_type = other DNA
ctaataaatttgatcttggctgtggyggccatggcctatgaggaacagaat

SEQ ID NO: 2483 - DNA, 51 bp, synthetic construct
  misc_feature 1..51: note = Synthetic polynucleotide
  source 1..51: mol_type = other DNA
gttgacctggccatcaccatctgcaytgtcttaaatacactcttcatggct

SEQ ID NO: 2484 - DNA, 51 bp, synthetic construct
  misc_feature 1..51: note = Synthetic polynucleotide
  source 1..51: mol_type = other DNA
tatgcagctgttgattcacgaaatgyaagtctagttagagggaaattgttt

SEQ ID NO: 2485 - DNA, 51 bp, synthetic construct
  misc_feature 1..51: note = Synthetic polynucleotide
  source 1..51: mol_type = other DNA
tggattaatctggtgtttattgttcygttcactggagaatgtgtgctgaaa

SEQ ID NO: 2486 - DNA, 51 bp, synthetic construct
  misc_feature 1..51: note = Synthetic polynucleotide
  source 1..51: mol_type = other DNA
cagctcattgccatggatttgcccahggtgagtggtgaccggatccactgt

SEQ ID NO: 2487 - DNA, 51 bp, synthetic construct
  misc_feature 1..51: note = Synthetic polynucleotide
  source 1..51: mol_type = other DNA
aatcccaattatggctacacaagctytgataccttcagttgggcttttttg

SEQ ID NO: 2488 - DNA, 51 bp, synthetic construct
  misc_feature 1..51: note = Synthetic polynucleotide
  source 1..51: mol_type = other DNA
tcggcattgagaacattcagagttcyccgagcattgaagacgatttcagtc

SEQ ID NO: 2489 - DNA, 51 bp, synthetic construct
  misc_feature 1..51: note = Synthetic polynucleotide
  source 1..51: mol_type = other DNA
attcaaacatacctgccatgcataaygacagtgattctctcacaagtctcc

SEQ ID NO: 2490 - DNA, 51 bp, synthetic construct
  misc_feature 1..51: note = Synthetic polynucleotide
  source 1..51: mol_type = other DNA
gcccgtattgggcgcatcttgcgtcygatcaaaggcgccaaagggattcgt

SEQ ID NO: 2491 - DNA, 51 bp, synthetic construct
  misc_feature 1..51: note = Synthetic polynucleotide
  source 1..51: mol_type = other DNA
ttactaccgcgagaacaagcagggcyggcagaactccatccgccacaatct

SEQ ID NO: 2492 - DNA, 51 bp, synthetic construct
  misc_feature 1..51: note = Synthetic polynucleotide
  source 1..51: mol_type = other DNA
aagaatctcaagccggagacgctggygaggccacctcctgctccctgcctg

SEQ ID NO: 2493 - DNA, 51 bp, synthetic construct
  misc_feature 1..51: note = Synthetic polynucleotide
  source 1..51: mol_type = other DNA
agggaagccatcccaggtaagtgccrtgagtttaggtgtgacccgcatctg

SEQ ID NO: 2494 - DNA, 51 bp, synthetic construct
  misc_feature 1..51: note = Synthetic polynucleotide
  source 1..51: mol_type = other DNA
aggcaggtaggagacacccatctccrgcatgccggccagagtcactgggtg

SEQ ID NO: 2495 - DNA, 51 bp, synthetic construct
  misc_feature 1..51: note = Synthetic polynucleotide
  source 1..51: mol_type = other DNA
gggtcacgtggccggcggccccccaygacgtgctggctgcggggcgtcacg

SEQ ID NO: 2496 - DNA, 51 bp, synthetic construct
  misc_feature 1..51: note = Synthetic polynucleotide
  source 1..51: mol_type = other DNA
acccccacccccgccccagggcctcrccggatcaaaggctgggagctcgaa

SEQ ID NO: 2497 - DNA, 51 bp, synthetic construct
  misc_feature 1..51: note = Synthetic polynucleotide
  source 1..51: mol_type = other DNA
ctcccagggcaacgtctttgccacayctgcgctccggagcctgcgcttcct

SEQ ID NO: 2498 - DNA, 51 bp, synthetic construct
  misc_feature 1..51: note = Synthetic polynucleotide
  source 1..51: mol_type = other DNA
tattcaccttggtgctacttcttgcyatgttggagacaatactgtaggcgc

SEQ ID NO: 2499 - DNA, 51 bp, synthetic construct
  misc_feature 1..51: note = Synthetic polynucleotide
  source 1..51: mol_type = other DNA
ccagttggatcatttactggatcctycttctttcactggtcgtgcctccca

SEQ ID NO: 2500 - DNA, 51 bp, synthetic construct
  misc_feature 1..51: note = Synthetic polynucleotide
  source 1..51: mol_type = other DNA
gggtctggaaaaactgcagcatttcygttgcccatcttgagtcagatttat

SEQ ID NO: 2501 - DNA, 51 bp, synthetic construct
  misc_feature 1..51: note = Synthetic polynucleotide
  source 1..51: mol_type = other DNA
taaaaattttttttctttcagatgcyggctcgtgatttcttagatgaatat

SEQ ID NO: 2502 - DNA, 51 bp, synthetic construct
  misc_feature 1..51: note = Synthetic polynucleotide
  source 1..51: mol_type = other DNA
gacatttcaaatgtgaaacatgttaycaattttgacttgccaagtgatatt

SEQ ID NO: 2503 - DNA, 51 bp, synthetic construct
  misc_feature 1..51: note = Synthetic polynucleotide
  source 1..51: mol_type = other DNA
accatcgccttccgacacctcttccygctgggctactcggacggagcggat

SEQ ID NO: 2504 - DNA, 51 bp, synthetic construct
  misc_feature 1..51: note = Synthetic polynucleotide
  source 1..51: mol_type = other DNA
tactgcttctgtggctggatcgtgcyggggccctatcatgtgaaggtacat

SEQ ID NO: 2505 - DNA, 51 bp, synthetic construct
  misc_feature 1..51: note = Synthetic polynucleotide
  source 1..51: mol_type = other DNA
ccccgcgaagccatcagtactttgtytgacaacaatacatgggtgaaacac

SEQ ID NO: 2506 - DNA, 51 bp, synthetic construct
  misc_feature 1..51: note = Synthetic polynucleotide
  source 1..51: mol_type = other DNA
cagctccgaactggaaggcgcctgcyctgagtacctggcaccgctgagcgc

SEQ ID NO: 2507 - DNA, 51 bp, synthetic construct
  misc_feature 1..51: note = Synthetic polynucleotide
  source 1..51: mol_type = other DNA
ggacgccaactccgacttctcctccyacgccgactcgctctggtgggggac

SEQ ID NO: 2508 - DNA, 51 bp, synthetic construct
  misc_feature 1..51: note = Synthetic polynucleotide
  source 1..51: mol_type = other DNA
cttctcctcctacgccgactcgctcyggtgggggacggtgcgtgagggtct

SEQ ID NO: 2509 - DNA, 51 bp, synthetic construct
  misc_feature 1..51: note = Synthetic polynucleotide
  source 1..51: mol_type = other DNA
ggggaagaaaccagcgaagccaaaabgccctgccgtgtgtacttgtaccaa

SEQ ID NO: 2510 - DNA, 51 bp, synthetic construct
  misc_feature 1..51: note = Synthetic polynucleotide
  source 1..51: mol_type = other DNA
cagctcagccagctccagaagcaggygataccccacctcacccctctctcc

SEQ ID NO: 2511 - DNA, 51 bp, synthetic construct
  misc_feature 1..51: note = Synthetic polynucleotide
  source 1..51: mol_type = other DNA
aaacgtgcctttgttcactggtacgytggggaggggatggaggaaggtgag

SEQ ID NO: 2512 - DNA, 51 bp, synthetic construct
  misc_feature 1..51: note = Synthetic polynucleotide
  source 1..51: mol_type = other DNA
gacgtgttcaatatgttctgttaccytggtcctcacctttctcacgatccc

SEQ ID NO: 2513 - DNA, 51 bp, synthetic construct
  misc_feature 1..51: note = Synthetic polynucleotide
  source 1..51: mol_type = other DNA
acatcaacagaaaactccaaattttyccacacttctttgctatgatcgagt

SEQ ID NO: 2514 - DNA, 51 bp, synthetic construct
  misc_feature 1..51: note = Synthetic polynucleotide
  source 1..51: mol_type = other DNA
gattatataaagcgagtgccttcaaytgatgtactctgtaatgaatttcat

SEQ ID NO: 2515 - DNA, 51 bp, synthetic construct
  misc_feature 1..51: note = Synthetic polynucleotide
  source 1..51: mol_type = other DNA
caggtagcagcaagaggactggacayttcaaatgtgaaacatgttatcaat

SEQ ID NO: 2516 - DNA, 51 bp, synthetic construct
  misc_feature 1..51: note = Synthetic polynucleotide
  source 1..51: mol_type = other DNA
tgaataaaaatcacagttattacttrccaaggcctttgattcttggtagta

SEQ ID NO: 2517 - DNA, 51 bp, synthetic construct
  misc_feature 1..51: note = Synthetic polynucleotide
  source 1..51: mol_type = other DNA
atgaacatcttcgtgggcttcgtcaycgtcacctttcaggagcagggggag

SEQ ID NO: 2518 - DNA, 51 bp, synthetic construct
  misc_feature 1..51: note = Synthetic polynucleotide
  source 1..51: mol_type = other DNA
tgtacatcaggaagtggctctggtcytccttttctggtacaaagaacagtg

SEQ ID NO: 2519 - DNA, 51 bp, synthetic construct
  misc_feature 1..51: note = Synthetic polynucleotide
  source 1..51: mol_type = other DNA
ccctacgggcgtctggcctaccaccyggctgtggtgctgggcagtgctgcc

SEQ ID NO: 2520 - DNA, 51 bp, synthetic construct
  misc_feature 1..51: note = Synthetic polynucleotide
  source 1..51: mol_type = other DNA
agctgcctttccgaagtgcccatcaycttcaccctgctgggcgtgggaacc

SEQ ID NO: 2521 - DNA, 51 bp, synthetic construct
  misc_feature 1..51: note = Synthetic polynucleotide
  source 1..51: mol_type = other DNA
ggtctgcgtcttcggaatgggctccygggtgaccatcaatgggctctgggt

SEQ ID NO: 2522 - DNA, 51 bp, synthetic construct
  misc_feature 1..51: note = Synthetic polynucleotide
  source 1..51: mol_type = other DNA
ccataccttaccactaaatgtagtgyaagtatagagctgtcttattcttgt

SEQ ID NO: 2523 - DNA, 51 bp, synthetic construct
  misc_feature 1..51: note = Synthetic polynucleotide
  source 1..51: mol_type = other DNA
cgtaatctgaatcttttttctccccdtagtccccgtttttcttctctctct

SEQ ID NO: 2524 - DNA, 51 bp, synthetic construct
  misc_feature 1..51: note = Synthetic polynucleotide
  source 1..51: mol_type = other DNA
aatactcgctgaccctgcttgtgccrtattttcaacaaagactcaacaaca

SEQ ID NO: 2525 - DNA, 51 bp, synthetic construct
  misc_feature 1..51: note = Synthetic polynucleotide
  source 1..51: mol_type = other DNA
gttcatgctgttctacaaagaggcgyaagtagaagagttagagagacgctg

SEQ ID NO: 2526 - DNA, 51 bp, synthetic construct
  misc_feature 1..51: note = Synthetic polynucleotide
  source 1..51: mol_type = other DNA
ctcccgcccgcgttgaagaactcacrcttggccactgggaggcagagatga

SEQ ID NO: 2527 - DNA, 51 bp, synthetic construct
  misc_feature 1..51: note = Synthetic polynucleotide
  source 1..51: mol_type = other DNA
cattatgctctccacagtggagtgaygcttcggggctcaggcatccagtgg

SEQ ID NO: 2528 - DNA, 51 bp, synthetic construct
  misc_feature 1..51: note = Synthetic polynucleotide
  source 1..51: mol_type = other DNA
aaggaagtgataaactatgaggacaytgaggctctcattggcccgccgccc

SEQ ID NO: 2529 - DNA, 51 bp, synthetic construct
  misc_feature 1..51: note = Synthetic polynucleotide
  source 1..51: mol_type = other DNA
cacacgcaaatttccttccactcggrtaagatgctgaggaggggccagacc

SEQ ID NO: 2530 - DNA, 51 bp, synthetic construct
  misc_feature 1..51: note = Synthetic polynucleotide
  source 1..51: mol_type = other DNA
aggttaatgcctgataaagaaagcakgtattacccacgggtacaacattac

SEQ ID NO: 2531 - DNA, 51 bp, synthetic construct
  misc_feature 1..51: note = Synthetic polynucleotide
  source 1..51: mol_type = other DNA
tgcctgccaacgtacaacaatcaacyggttttcaccaagtccaaccaccgc

SEQ ID NO: 2532 - DNA, 51 bp, synthetic construct
  misc_feature 1..51: note = Synthetic polynucleotide
  source 1..51: mol_type = other DNA
ttaattcctccattttcccaccagayggaaggactggagctttgtggacaa

SEQ ID NO: 2533 - DNA, 51 bp, synthetic construct
  misc_feature 1..51: note = Synthetic polynucleotide
  source 1..51: mol_type = other DNA
aaattgttcttttcataccgtggctrggagagactgaagttcaatttccag

SEQ ID NO: 2534 - DNA, 51 bp, synthetic construct
  misc_feature 1..51: note = Synthetic polynucleotide
  source 1..51: mol_type = other DNA
ccaggtgtattcaatggaaagcgtgbcctggtggttggcctggggaattcg

SEQ ID NO: 2535 - DNA, 51 bp, synthetic construct
  misc_feature 1..51: note = Synthetic polynucleotide
  source 1..51: mol_type = other DNA
gaaattcaagctgaaataagtgaacygttagaagagcacacggaggagtac

SEQ ID NO: 2536 - DNA, 51 bp, synthetic construct
  misc_feature 1..51: note = Synthetic polynucleotide
  source 1..51: mol_type = other DNA
taccaagtcatattttcttcacagaytgatggaacatttaaaatagatatt

SEQ ID NO: 2537 - DNA, 51 bp, synthetic construct
  misc_feature 1..51: note = Synthetic polynucleotide
  source 1..51: mol_type = other DNA
cctgtaacaaatgtattaaatattcrttctgagaattaatgatactggcac

SEQ ID NO: 2538 - DNA, 51 bp, synthetic construct
  misc_feature 1..51: note = Synthetic polynucleotide
  source 1..51: mol_type = other DNA
cgtttggccctcccgcacgcctgacrggagcttccatgccgcccctgcagt

SEQ ID NO: 2539 - DNA, 51 bp, synthetic construct
  misc_feature 1..51: note = Synthetic polynucleotide
  source 1..51: mol_type = other DNA
acatccctctctgctctgcagcaaaktcaaccaccagaacattgttcgctg

SEQ ID NO: 2540-3143 - skipped (604 entries)

SEQ ID NO: 3144 - DNA, 51 bp, synthetic construct
  misc_feature 1..51: note = Synthetic polynucleotide
  source 1..51: mol_type = other DNA
gtgggcccccacccgctagttgtcavcatgtactttgctactggcttcagt

SEQ ID NO: 3145 - DNA, 51 bp, synthetic construct
  misc_feature 1..51: note = Synthetic polynucleotide
  source 1..51: mol_type = other DNA
ctagtgcggctgtggttgctttttcvgatttccattcccaataacgtgaag

SEQ ID NO: 3146 - DNA, 51 bp, synthetic construct
  misc_feature 1..51: note = Synthetic polynucleotide
  source 1..51: mol_type = other DNA
tatgttttcagaaacttggatcctgrggtaaaaacaagaaatgagtgttaa

SEQ ID NO: 3147 - DNA, 51 bp, synthetic construct
  misc_feature 1..51: note = Synthetic polynucleotide
  source 1..51: mol_type = other DNA
ggcaacctggacccctgtgccttgtrtgcatctgaggtaacagccagggcc

SEQ ID NO: 3148 - DNA, 51 bp, synthetic construct
  misc_feature 1..51: note = Synthetic polynucleotide
  source 1..51: mol_type = other DNA
acagaggactgcagaaaatcaacctrtcctccttcaggaccaacgtgagta

SEQ ID NO: 3149 - DNA, 51 bp, synthetic construct
  misc_feature 1..51: note = Synthetic polynucleotide
  source 1..51: mol_type = other DNA
gggtagatggtatgtggtacaaacarattatgaccgttggaaacatccctt

SEQ ID NO: 3150 - DNA, 51 bp, synthetic construct
  misc_feature 1..51: note = Synthetic polynucleotide
  source 1..51: mol_type = other DNA
ggtgactcccccatcccgcaggaccragttcctgagcgacaggtggatgct

SEQ ID NO: 3151 - DNA, 51 bp, synthetic construct
  misc_feature 1..51: note = Synthetic polynucleotide
  source 1..51: mol_type = other DNA
ggcgttgttgttccggatccaggttrcctaatgggagtgcgagagctctgc

SEQ ID NO: 3152 - DNA, 51 bp, synthetic construct
  misc_feature 1..51: note = Synthetic polynucleotide
  source 1..51: mol_type = other DNA
gataactgcactttcaacacctgccrgaaagctcttgggaaggatgatttt

SEQ ID NO: 3153 - DNA, 51 bp, synthetic construct
  misc_feature 1..51: note = Synthetic polynucleotide
  source 1..51: mol_type = other DNA
gatttacaccaatcaagagaaaaccrggtgggtcctcccaacccccaatca

SEQ ID NO: 3154 - DNA, 51 bp, synthetic construct
  misc_feature 1..51: note = Synthetic polynucleotide
  source 1..51: mol_type = other DNA
agtgcgaaggatctggtagagaacargttcctgctgcccagtgccaactcc

SEQ ID NO: 3155 - DNA, 51 bp, synthetic construct
  misc_feature 1..51: note = Synthetic polynucleotide
  source 1..51: mol_type = other DNA
tttttattctacctctcctttgaacrgcatcctggtggggaagaagtttta

SEQ ID NO: 3156 - DNA, 51 bp, synthetic construct
  misc_feature 1..51: note = Synthetic polynucleotide
  source 1..51: mol_type = other DNA
cgcttcaagctctggtacacgctggrcagagcccctgaaggtgagtgaggg

SEQ ID NO: 3157 - DNA, 51 bp, synthetic construct
  misc_feature 1..51: note = Synthetic polynucleotide
  source 1..51: mol_type = other DNA
attattattgttattactattactgrtttttaaaaatgcttgttgatagaa

SEQ ID NO: 3158 - DNA, 51 bp, synthetic construct
  misc_feature 1..51: note = Synthetic polynucleotide
  source 1..51: mol_type = other DNA
tggcccagaaaggccgcggtctcgtrgtccggtgagccggtcactctcccc

SEQ ID NO: 3159 - DNA, 51 bp, synthetic construct
  misc_feature 1..51: note = Synthetic polynucleotide
  source 1..51: mol_type = other DNA
gagtgtaccaaaacgtgccagaactrtgacctggagtgcatgagcatgggc

SEQ ID NO: 3160 - DNA, 51 bp, synthetic construct
  misc_feature 1..51: note = Synthetic polynucleotide
  source 1..51: mol_type = other DNA
acctgcggcctgtgtgggaattacartggcaaccagggcgacgacttcctt

SEQ ID NO: 3161 - DNA, 51 bp, synthetic construct
  misc_feature 1..51: note = Synthetic polynucleotide
  source 1..51: mol_type = other DNA
actttcccagaagatggaggagagtrtatgtgtaaagcagtcaacaataaa

SEQ ID NO: 3162 - DNA, 51 bp, synthetic construct
  misc_feature 1..51: note = Synthetic polynucleotide
  source 1..51: mol_type = other DNA
cgaaaggggcttgaagttaatgtcaraggtgaattattttgataatctagc

SEQ ID NO: 3163 - DNA, 51 bp, synthetic construct
  misc_feature 1..51: note = Synthetic polynucleotide
  source 1..51: mol_type = other DNA
tctctttgtctttctcttttttaaaraattcaggctctgctggttcttcat

SEQ ID NO: 3164 - DNA, 51 bp, synthetic construct
  misc_feature 1..51: note = Synthetic polynucleotide
  source 1..51: mol_type = other DNA
cctacagacctggagacaagaagctrtaagtatcttctcttgtccatggtg

SEQ ID NO: 3165 - DNA, 51 bp, synthetic construct
  misc_feature 1..51: note = Synthetic polynucleotide
  source 1..51: mol_type = other DNA
aaaaacatgttattttccttcttcarctagattacagatctgcttgatgtt

SEQ ID NO: 3166 - DNA, 51 bp, synthetic construct
  misc_feature 1..51: note = Synthetic polynucleotide
  source 1..51: mol_type = other DNA
taccatggccttctggggaacaggtrtgggatagggcagttgggcaatctc

SEQ ID NO: 3167 - DNA, 51 bp, synthetic construct
  misc_feature 1..51: note = Synthetic polynucleotide
  source 1..51: mol_type = other DNA
ctggccaagcagccgtctttccgccrgtactccggctacctcaaaggctcc

SEQ ID NO: 3168 - DNA, 51 bp, synthetic construct
  misc_feature 1..51: note = Synthetic polynucleotide
  source 1..51: mol_type = other DNA
ctttagaaataccagatcctattatrtaatggagatgtagacatggcctgc

SEQ ID NO: 3169 - DNA, 51 bp, synthetic construct
  misc_feature 1..51: note = Synthetic polynucleotide
  source 1..51: mol_type = other DNA
ctcccacatcgcctttctcacgatcraggtagggactgggcctgctgagag

SEQ ID NO: 3170 - DNA, 51 bp, synthetic construct
  misc_feature 1..51: note = Synthetic polynucleotide
  source 1..51: mol_type = other DNA
ttccaaacacagtagggtcccctttytatgggaggaaaacacaaaaggagc

SEQ ID NO: 3171 - DNA, 51 bp, synthetic construct
  misc_feature 1..51: note = Synthetic polynucleotide
  source 1..51: mol_type = other DNA
taatctgctgtatgatcggggcacaragtttggcctcttcactccaggatc

SEQ ID NO: 3172 - DNA, 51 bp, synthetic construct
  misc_feature 1..51: note = Synthetic polynucleotide
  source 1..51: mol_type = other DNA
aacaatccaaatggccatgggcacarttataaaggtgagagaaaaactgat

SEQ ID NO: 3173 - DNA, 51 bp, synthetic construct
  misc_feature 1..51: note = Synthetic polynucleotide
  source 1..51: mol_type = other DNA
actgtttgggaaatgcaacaatccaratggccatgggcacaattataaagg

SEQ ID NO: 3174 - DNA, 51 bp, synthetic construct
  misc_feature 1..51: note = Synthetic polynucleotide
  source 1..51: mol_type = other DNA
gaaaatgtagctgtttatatctgggrcaacctccagaaagttcttcctgta

SEQ ID NO: 3175 - DNA, 51 bp, synthetic construct
  misc_feature 1..51: note = Synthetic polynucleotide
  source 1..51: mol_type = other DNA
ccccatttcccaggtatgatcgggtrcggcatggccaagggtgctgttcac

SEQ ID NO: 3176 - DNA, 51 bp, synthetic construct
  misc_feature 1..51: note = Synthetic polynucleotide
  source 1..51: mol_type = other DNA
tctatttttctttatcatcccttcarctggcaatcagaaatgcacttaaac

SEQ ID NO: 3177 - DNA, 51 bp, synthetic construct
  misc_feature 1..51: note = Synthetic polynucleotide
  source 1..51: mol_type = other DNA
ttcatcaatatctgtgaaaacagcaytgcaaccacattgtcaggtctgctt

SEQ ID NO: 3178 - DNA, 51 bp, synthetic construct
  misc_feature 1..51: note = Synthetic polynucleotide
  source 1..51: mol_type = other DNA
gatcctctctctttttttcccatttrggtgtgaaatgtttctcttattcta

SEQ ID NO: 3179 - DNA, 51 bp, synthetic construct
  misc_feature 1..51: note = Synthetic polynucleotide
  source 1..51: mol_type = other DNA
agggcctttaatgtggaactggctcrggctggtattaagataccttaaaat

SEQ ID NO: 3180 - DNA, 51 bp, synthetic construct
  misc_feature 1..51: note = Synthetic polynucleotide
  source 1..51: mol_type = other DNA
actaaaacgattgtaacactgtagayaccttagagaacaatggatttccat

SEQ ID NO: 3181 - DNA, 51 bp, synthetic construct
  misc_feature 1..51: note = Synthetic polynucleotide
  source 1..51: mol_type = other DNA
gagacctcactcccggggagccagcdtgtccactgcggtcctggaaaaccc

SEQ ID NO: 3182 - DNA, 51 bp, synthetic construct
  misc_feature 1..51: note = Synthetic polynucleotide
  source 1..51: mol_type = other DNA
tccttgtataaaacccatgcttgctrtgagtacaatcacatttttccactt

SEQ ID NO: 3183 - DNA, 51 bp, synthetic construct
  misc_feature 1..51: note = Synthetic polynucleotide
  source 1..51: mol_type = other DNA
atacctcggcccttctcagttcgctrcgacccatacacccaaaggattgag

SEQ ID NO: 3184 - DNA, 51 bp, synthetic construct
  misc_feature 1..51: note = Synthetic polynucleotide
  source 1..51: mol_type = other DNA
cttgaaaagtactgtggcttccatgragataacattccccagctggaagac

SEQ ID NO: 3185 - DNA, 51 bp, synthetic construct
  misc_feature 1..51: note = Synthetic polynucleotide
  source 1..51: mol_type = other DNA
ttctattttcccccaattacaggaarttggccttgcctctctgggtgcacc

SEQ ID NO: 3186 - DNA, 51 bp, synthetic construct
  misc_feature 1..51: note = Synthetic polynucleotide
  source 1..51: mol_type = other DNA
ttccagcccctgtattacgtggcagrgagttttaatgatgccaaggagaaa

SEQ ID NO: 3187 - DNA, 51 bp, synthetic construct
  misc_feature 1..51: note = Synthetic polynucleotide
  source 1..51: mol_type = other DNA
tgtcatcctttggtgaattacaggtvtgaccttcacaggaaccaaggatag

SEQ ID NO: 3188 - DNA, 51 bp, synthetic construct
  misc_feature 1..51: note = Synthetic polynucleotide
  source 1..51: mol_type = other DNA
agaccttctcgtttaaagaaagatgvgtatgaatttttcacccatttggat

SEQ ID NO: 3189 - DNA, 51 bp, synthetic construct
  misc_feature 1..51: note = Synthetic polynucleotide
  source 1..51: mol_type = other DNA
cattaaaaactgcccaaagaaaaccrggaatcttaagaaaataactcgtga

SEQ ID NO: 3190 - DNA, 51 bp, synthetic construct
  misc_feature 1..51: note = Synthetic polynucleotide
  source 1..51: mol_type = other DNA
ggctctgcctgtcgggcttgggcctrctactcagctgtgaacccagtaggt

SEQ ID NO: 3191 - DNA, 51 bp, synthetic construct
  misc_feature 1..51: note = Synthetic polynucleotide
  source 1..51: mol_type = other DNA
ttggtccccgcgcagccccagctcarcgtgtgcaactgggcggtcatggta

SEQ ID NO: 3192 - DNA, 51 bp, synthetic construct
  misc_feature 1..51: note = Synthetic polynucleotide
  source 1..51: mol_type = other DNA
actctttttgaaactgatgaacgctrccgacatttaggattctctgttgat

SEQ ID NO: 3193 - DNA, 51 bp, synthetic construct
  misc_feature 1..51: note = Synthetic polynucleotide
  source 1..51: mol_type = other DNA
taacttcttggcatccttgtagggcrtagacgagggccccgaggggctgaa

SEQ ID NO: 3194 - DNA, 51 bp, synthetic construct
  misc_feature 1..51: note = Synthetic polynucleotide
  source 1..51: mol_type = other DNA
gtgcacggggccggtaatttggtcarcacttactatgacttttccaagggc

SEQ ID NO: 3195 - DNA, 51 bp, synthetic construct
  misc_feature 1..51: note = Synthetic polynucleotide
  source 1..51: mol_type = other DNA
cattgaccacaaaaagagtgatgacrggacacttgtggaccgaatcttgga

SEQ ID NO: 3196 - DNA, 51 bp, synthetic construct
  misc_feature 1..51: note = Synthetic polynucleotide
  source 1..51: mol_type = other DNA
agcaccgaggccattctccattccarcaacaccagggacatggagtccgac

SEQ ID NO: 3197 - DNA, 51 bp, synthetic construct
  misc_feature 1..51: note = Synthetic polynucleotide
  source 1..51: mol_type = other DNA
tactatgacttttccaagggcattgrccacaaaaagagtgatgacaggaca

SEQ ID NO: 3198 - DNA, 51 bp, synthetic construct
  misc_feature 1..51: note = Synthetic polynucleotide
  source 1..51: mol_type = other DNA
gttgcaacaggatataaaaatatgtrttcaacaaacatattcaccaaaagg

SEQ ID NO: 3199 - DNA, 51 bp, synthetic construct
  misc_feature 1..51: note = Synthetic polynucleotide
  source 1..51: mol_type = other DNA
cgggaccctggggaagcgcggccagrtatcacccaccaggtaactccaggg

SEQ ID NO: 3200 - DNA, 51 bp, synthetic construct
  misc_feature 1..51: note = Synthetic polynucleotide
  source 1..51: mol_type = other DNA
ctgctgctctggtcctaggctccgtrtgtggatgtgatctgtttgaacagc

SEQ ID NO: 3201 - DNA, 51 bp, synthetic construct
  misc_feature 1..51: note = Synthetic polynucleotide
  source 1..51: mol_type = other DNA
ctggcgcccagctcagccactgaagracaggcaaatcaaagcttccttcaa

SEQ ID NO: 3202 - DNA, 51 bp, synthetic construct
  misc_feature 1..51: note = Synthetic polynucleotide
  source 1..51: mol_type = other DNA
tcccccaggacctgagcactggcatvaggacttccccattgccaagggaga

SEQ ID NO: 3203 - DNA, 51 bp, synthetic construct
  misc_feature 1..51: note = Synthetic polynucleotide
  source 1..51: mol_type = other DNA
tttataggtgggaccaattttgcctrttggaatggtaagagcactttaata

SEQ ID NO: 3204 - DNA, 51 bp, synthetic construct
  misc_feature 1..51: note = Synthetic polynucleotide
  source 1..51: mol_type = other DNA
tttgcagggtttggtttctaacctgrctctcagttccaatatcctcacgga

SEQ ID NO: 3205 - DNA, 51 bp, synthetic construct
  misc_feature 1..51: note = Synthetic polynucleotide
  source 1..51: mol_type = other DNA
gagagtcaggttagaaaccaaacccygcaaagcagaaacagagcacagtga

SEQ ID NO: 3206 - DNA, 51 bp, synthetic construct
  misc_feature 1..51: note = Synthetic polynucleotide
  source 1..51: mol_type = other DNA
attaatggctttaaccttggccgctrttggccagcccggggccctcagttg

SEQ ID NO: 3207 - DNA, 51 bp, synthetic construct
  misc_feature 1..51: note = Synthetic polynucleotide
  source 1..51: mol_type = other DNA
actctgagcgttagcagctttttcargcaggtatctcttcacattacagtg

SEQ ID NO: 3208 - DNA, 51 bp, synthetic construct
  misc_feature 1..51: note = Synthetic polynucleotide
  source 1..51: mol_type = other DNA
tgccactgccatcggggaccctccaratgtcattattgtttccaaccaaga

SEQ ID NO: 3209 - DNA, 51 bp, synthetic construct
  misc_feature 1..51: note = Synthetic polynucleotide
  source 1..51: mol_type = other DNA
atttccgtggcagccaactgcctctvtgcatatctccacatcccagcttct

SEQ ID NO: 3210 - DNA, 51 bp, synthetic construct
  misc_feature 1..51: note = Synthetic polynucleotide
  source 1..51: mol_type = other DNA
actgttcatttttcttttaaatttarggtggtttgttggaaatgctccgac

SEQ ID NO: 3211 - DNA, 51 bp, synthetic construct
  misc_feature 1..51: note = Synthetic polynucleotide
  source 1..51: mol_type = other DNA
tgtgacactttctgcctctctccgcrggaaacatggaccgtcaccactacg

SEQ ID NO: 3212 - DNA, 51 bp, synthetic construct
  misc_feature 1..51: note = Synthetic polynucleotide
  source 1..51: mol_type = other DNA
ggcaggcagcccttctggacactgcrtgatcacaggagcagccctctggcc

SEQ ID NO: 3213 - DNA, 51 bp, synthetic construct
  misc_feature 1..51: note = Synthetic polynucleotide
  source 1..51: mol_type = other DNA
ttttttttttttttttaaagaattcrgtagctttgttgtccggaccaacac

SEQ ID NO: 3214 - DNA, 51 bp, synthetic construct
  misc_feature 1..51: note = Synthetic polynucleotide
  source 1..51: mol_type = other DNA
catcttttatttaacttaaatttcartcattttgcagtgatatggtttact

SEQ ID NO: 3215 - DNA, 51 bp, synthetic construct
  misc_feature 1..51: note = Synthetic polynucleotide
  source 1..51: mol_type = other DNA
tctactgggtgaaggaatttatgccrgatacaattgtcgggatgctgtgtg

SEQ ID NO: 3216 - DNA, 51 bp, synthetic construct
  misc_feature 1..51: note = Synthetic polynucleotide
  source 1..51: mol_type = other DNA
ttaagccgaaaccggggcaagacagrccgggtagcccggtattttgagtac

SEQ ID NO: 3217 - DNA, 51 bp, synthetic construct
  misc_feature 1..51: note = Synthetic polynucleotide
  source 1..51: mol_type = other DNA
gctccagttttcttcagagaagaatrtatgctgaataatgctgttggtatg

SEQ ID NO: 3218 - DNA, 51 bp, synthetic construct
  misc_feature 1..51: note = Synthetic polynucleotide
  source 1..51: mol_type = other DNA
ttttcttatttctgtattactagaaraccttcaagcttggttcagagagat

SEQ ID NO: 3219 - DNA, 51 bp, synthetic construct
  misc_feature 1..51: note = Synthetic polynucleotide
  source 1..51: mol_type = other DNA
gagccctgccacttccccttccagtrccaccggcagctgtaccacaaatgt

SEQ ID NO: 3220 - DNA, 51 bp, synthetic construct
  misc_feature 1..51: note = Synthetic polynucleotide
  source 1..51: mol_type = other DNA
ttcatccgccgggaaggcatccgccrgtacggcaagtgcctgcacgactgt

SEQ ID NO: 3221 - DNA, 51 bp, synthetic construct
  misc_feature 1..51: note = Synthetic polynucleotide
  source 1..51: mol_type = other DNA
taaaagactggaaagacttgttcacraaggaaaaattgaccagtgctttaa

SEQ ID NO: 3222 - DNA, 51 bp, synthetic construct
  misc_feature 1..51: note = Synthetic polynucleotide
  source 1..51: mol_type = other DNA
tgtcttaattttacctaatgtttgtrggttggaatacagatttggagaatt

SEQ ID NO: 3223 - DNA, 51 bp, synthetic construct
  misc_feature 1..51: note = Synthetic polynucleotide
  source 1..51: mol_type = other DNA
catgagctccctgccctacatgaagrtgatctttcccctcatcatgatcgc

SEQ ID NO: 3224 - DNA, 51 bp, synthetic construct
  misc_feature 1..51: note = Synthetic polynucleotide
  source 1..51: mol_type = other DNA
caggctgctcgtgttgctattgaacrcctggacaagatcagcgatagcgtc

SEQ ID NO: 3225 - DNA, 51 bp, synthetic construct
  misc_feature 1..51: note = Synthetic polynucleotide
  source 1..51: mol_type = other DNA
cacctggccccagttgtaattgtgartatctcatacctatccctattggca

SEQ ID NO: 3226 - DNA, 51 bp, synthetic construct
  misc_feature 1..51: note = Synthetic polynucleotide
  source 1..51: mol_type = other DNA
tattaaaacagttgtaactgtttatrggagacagaatcttccttggctgtt

SEQ ID NO: 3227 - DNA, 51 bp, synthetic construct
  misc_feature 1..51: note = Synthetic polynucleotide
  source 1..51: mol_type = other DNA
tatcaggtttctttctcagtcacatdtgaaatggatcatggagaagcacat

SEQ ID NO: 3228 - DNA, 51 bp, synthetic construct
  misc_feature 1..51: note = Synthetic polynucleotide
  source 1..51: mol_type = other DNA
gttgataatcatggttataacgttcragacatgacaacaacaagtattggt

SEQ ID NO: 3229 - DNA, 51 bp, synthetic construct
  misc_feature 1..51: note = Synthetic polynucleotide
  source 1..51: mol_type = other DNA
tctggagttatgtggacactaatatrtgatactatttatgcccatcaggta

SEQ ID NO: 3230 - DNA, 51 bp, synthetic construct
  misc_feature 1..51: note = Synthetic polynucleotide
  source 1..51: mol_type = other DNA
gcactgggtgttcttctgtgtctaarttactacaggtatattaaacgtttt

SEQ ID NO: 3231 - DNA, 51 bp, synthetic construct
  misc_feature 1..51: note = Synthetic polynucleotide
  source 1..51: mol_type = other DNA
cacagcctactttccaagcggagccrtgtctggtaacggcaatgcggctgc

SEQ ID NO: 3232 - DNA, 51 bp, synthetic construct
  misc_feature 1..51: note = Synthetic polynucleotide
  source 1..51: mol_type = other DNA
gagtaacaagctgacttacgggaccrtggtgtttgtcaggtccttccttgt

SEQ ID NO: 3233 - DNA, 51 bp, synthetic construct
  misc_feature 1..51: note = Synthetic polynucleotide
  source 1..51: mol_type = other DNA
atccgatacagcgctgtgaggcaccrgtctgaaatcaagccagggtaagga

SEQ ID NO: 3234 - DNA, 51 bp, synthetic construct
  misc_feature 1..51: note = Synthetic polynucleotide
  source 1..51: mol_type = other DNA
tgcttttttcccttttaaggcctcgrtccagctggacctaactttgagtat

SEQ ID NO: 3235 - DNA, 51 bp, synthetic construct
  misc_feature 1..51: note = Synthetic polynucleotide
  source 1..51: mol_type = other DNA
tgcaacaatctgggctatgagatcartaaagtcagagccaaaagaagcagc

SEQ ID NO: 3236 - DNA, 51 bp, synthetic construct
  misc_feature 1..51: note = Synthetic polynucleotide
  source 1..51: mol_type = other DNA
tacatcggccaattcttgcctggatrtgaggccccagcgttcatggacccc

SEQ ID NO: 3237 - DNA, 51 bp, synthetic construct
  misc_feature 1..51: note = Synthetic polynucleotide
  source 1..51: mol_type = other DNA
cttcttgtcacaaatggcgctgacartgctcttagggtattatgattattg

SEQ ID NO: 3238 - DNA, 51 bp, synthetic construct
  misc_feature 1..51: note = Synthetic polynucleotide
  source 1..51: mol_type = other DNA
ctcacaaacctggacttgagtatcarccagatagctcgtggattgtggatt

SEQ ID NO: 3239 - DNA, 51 bp, synthetic construct
  misc_feature 1..51: note = Synthetic polynucleotide
  source 1..51: mol_type = other DNA
tgctggacgacccggagctccgacarggtcaggccagtgtgccgggcaggc

SEQ ID NO: 3240 - DNA, 51 bp, synthetic construct
  misc_feature 1..51: note = Synthetic polynucleotide
  source 1..51: mol_type = other DNA
actggacataacagtggtgtcatacrtagtggaatttattataaacctgag

SEQ ID NO: 3241 - DNA, 51 bp, synthetic construct
  misc_feature 1..51: note = Synthetic polynucleotide
  source 1..51: mol_type = other DNA
acatccagtggaggtgtcacaggcartgacgtcattatgcacttcacgctc

SEQ ID NO: 3242 - DNA, 51 bp, synthetic construct
  misc_feature 1..51: note = Synthetic polynucleotide
  source 1..51: mol_type = other DNA
tttctttgtactgagccacatgacarggtaatatgcattttaaaatattgg

SEQ ID NO: 3243 - DNA, 51 bp, synthetic construct
  misc_feature 1..51: note = Synthetic polynucleotide
  source 1..51: mol_type = other DNA
gccctggttcgggacgtggcgggggrattttacaagttcggactggaaggt

SEQ ID NO: 3244 - DNA, 51 bp, synthetic construct
  misc_feature 1..51: note = Synthetic polynucleotide
  source 1..51: mol_type = other DNA
ttcatctgcaacacggccacagtctrtaagatctgtgcatggatgcagctg

SEQ ID NO: 3245 - DNA, 51 bp, synthetic construct
  misc_feature 1..51: note = Synthetic polynucleotide
  source 1..51: mol_type = other DNA
ttcaaagaaatggagaacaggaggargaaacagctgctcagggatctctct

SEQ ID NO: 3246 - DNA, 51 bp, synthetic construct
  misc_feature 1..51: note = Synthetic polynucleotide
  source 1..51: mol_type = other DNA
gttggaaaattatttcaagccttcartgcttgaagatccttgggctggcct

SEQ ID NO: 3247 - DNA, 51 bp, synthetic construct
  misc_feature 1..51: note = Synthetic polynucleotide
  source 1..51: mol_type = other DNA
tgcccttgtccctccaggagatggtracctgcacctcaatgtgacggcgga

SEQ ID NO: 3248 - DNA, 51 bp, synthetic construct
  misc_feature 1..51: note = Synthetic polynucleotide
  source 1..51: mol_type = other DNA
aacttgtgttttcatctctctctccrggtttccattctattatgaactaaa

SEQ ID NO: 3249 - DNA, 51 bp, synthetic construct
  misc_feature 1..51: note = Synthetic polynucleotide
  source 1..51: mol_type = other DNA
acatgctttgatatattgttctttgrccctgccatcagagtcctcagagac

SEQ ID NO: 3250 - DNA, 51 bp, synthetic construct
  misc_feature 1..51: note = Synthetic polynucleotide
  source 1..51: mol_type = other DNA
tgtggcctgtgcccaagtgcctaagdtaaccctcatcattgggggctccta

SEQ ID NO: 3251 - DNA, 51 bp, synthetic construct
  misc_feature 1..51: note = Synthetic polynucleotide
  source 1..51: mol_type = other DNA
gcagatgtgtttccagatcgagaccrctttggccgtacattctataatcag

SEQ ID NO: 3252 - DNA, 51 bp, synthetic construct
  misc_feature 1..51: note = Synthetic polynucleotide
  source 1..51: mol_type = other DNA
atcatccgactatatgaaatgccttrttttccaatgggattttggtcaaga

SEQ ID NO: 3253 - DNA, 51 bp, synthetic construct
  misc_feature 1..51: note = Synthetic polynucleotide
  source 1..51: mol_type = other DNA
tgtgactagaaataaaatatcagggrtatgctcccccttgagactgaagga

SEQ ID NO: 3254 - DNA, 51 bp, synthetic construct
  misc_feature 1..51: note = Synthetic polynucleotide
  source 1..51: mol_type = other DNA
ttcccaacccctttcttcccttcccrggggctgccgggaggctatcaaaag

SEQ ID NO: 3255 - DNA, 51 bp, synthetic construct
  misc_feature 1..51: note = Synthetic polynucleotide
  source 1..51: mol_type = other DNA
atgaaggccaaagagggcgtggtgtdtgtggaggtgcggtacagtccgcac

SEQ ID NO: 3256 - DNA, 51 bp, synthetic construct
  misc_feature 1..51: note = Synthetic polynucleotide
  source 1..51: mol_type = other DNA
tttagtaattgccccattgtccacartccccaactgggaaagggaattccg

SEQ ID NO: 3257 - DNA, 51 bp, synthetic construct
  misc_feature 1..51: note = Synthetic polynucleotide
  source 1..51: mol_type = other DNA
tttgcctctttacagccatcccttcrtcatccttcaactaatcaaaatcaa

SEQ ID NO: 3258 - DNA, 51 bp, synthetic construct
  misc_feature 1..51: note = Synthetic polynucleotide
  source 1..51: mol_type = other DNA
gtcccaggcaccggggtcaccacctrcgcagtgcacccaggcgtcgtccgc

SEQ ID NO: 3259 - DNA, 51 bp, synthetic construct
  misc_feature 1..51: note = Synthetic polynucleotide
  source 1..51: mol_type = other DNA
tacccgatggtgctaaaaaagaaagragaatcgaaagaggaagacgagttg

SEQ ID NO: 3260 - DNA, 51 bp, synthetic construct
  misc_feature 1..51: note = Synthetic polynucleotide
  source 1..51: mol_type = other DNA
gctttttttccccccttccctctagrtgatatgtttgttgaccttccattc

SEQ ID NO: 3261 - DNA, 51 bp, synthetic construct
  misc_feature 1..51: note = Synthetic polynucleotide
  source 1..51: mol_type = other DNA
tattttcaggcctttttcttggtctrtgctctgggatgtttaagtatttac

SEQ ID NO: 3262 - DNA, 51 bp, synthetic construct
  misc_feature 1..51: note = Synthetic polynucleotide
  source 1..51: mol_type = other DNA
aaaacagacgtgactatgctcttgtrtatagcagacaatctagcctgtttt

SEQ ID NO: 3263 - DNA, 51 bp, synthetic construct
  misc_feature 1..51: note = Synthetic polynucleotide
  source 1..51: mol_type = other DNA
gtcatcttatctacttgctttcatcrgggaagtctgaccgtcccgctacag

SEQ ID NO: 3264 - DNA, 51 bp, synthetic construct
  misc_feature 1..51: note = Synthetic polynucleotide
  source 1..51: mol_type = other DNA
cagctgttcgcgcgtcttctcctccrggtgtgcacgggagtgggaggcgtg

SEQ ID NO: 3265 - DNA, 51 bp, synthetic construct
  misc_feature 1..51: note = Synthetic polynucleotide
  source 1..51: mol_type = other DNA
tatactctgaaagagcgatgcctccrggttgtccggagcctagtcaagcct

SEQ ID NO: 3266 - DNA, 51 bp, synthetic construct
  misc_feature 1..51: note = Synthetic polynucleotide
  source 1..51: mol_type = other DNA
aattactatgttcgggccgtcctgcrtctcctgtgagtccccgtcccgcac

SEQ ID NO: 3267 - DNA, 51 bp, synthetic construct
  misc_feature 1..51: note = Synthetic polynucleotide
  source 1..51: mol_type = other DNA
ttgtttgggctccaggtgcggcggcrgcacatggagcgttgtaccagcttc

SEQ ID NO: 3268 - DNA, 51 bp, synthetic construct
  misc_feature 1..51: note = Synthetic polynucleotide
  source 1..51: mol_type = other DNA
gcagaagtcagatccacaaaagtgtyacatggaggtgctttgaattttatg

SEQ ID NO: 3269 - DNA, 51 bp, synthetic construct
  misc_feature 1..51: note = Synthetic polynucleotide
  source 1..51: mol_type = other DNA
cagtccggcccgccctcctgcagccvtgtcccggcccctgtcagaccaaga

SEQ ID NO: 3270 - DNA, 51 bp, synthetic construct
  misc_feature 1..51: note = Synthetic polynucleotide
  source 1..51: mol_type = other DNA
acttcacttctgttttatccctgtartgtttctgaagcatgcaggagaaag

SEQ ID NO: 3271 - DNA, 51 bp, synthetic construct
  misc_feature 1..51: note = Synthetic polynucleotide
  source 1..51: mol_type = other DNA
ctgtgccagccttgtgccgtgcactrtgactttgtgggctcctatgagagg

SEQ ID NO: 3272 - DNA, 51 bp, synthetic construct
  misc_feature 1..51: note = Synthetic polynucleotide
  source 1..51: mol_type = other DNA
aaaagttttgtattacgaattatacrgaagacaaatagcaactcagcctag

SEQ ID NO: 3273 - DNA, 51 bp, synthetic construct
  misc_feature 1..51: note = Synthetic polynucleotide
  source 1..51: mol_type = other DNA
agcacgggaagcagcctgatgccccrgaagaaaaaccccgacagtttggag

SEQ ID NO: 3274 - DNA, 51 bp, synthetic construct
  misc_feature 1..51: note = Synthetic polynucleotide
  source 1..51: mol_type = other DNA
caggctttcattactgctcagaatcrtggctatgccttggacaacaccctc

SEQ ID NO: 3275 - DNA, 51 bp, synthetic construct
  misc_feature 1..51: note = Synthetic polynucleotide
  source 1..51: mol_type = other DNA
gaccatttccaacatggaggcagatrtgaatagactcctcaaggtgtggaa

SEQ ID NO: 3276 - DNA, 51 bp, synthetic construct
  misc_feature 1..51: note = Synthetic polynucleotide
  source 1..51: mol_type = other DNA
catcacagggcagacatatacacgaraagtggatattgaagtactgtctgt

SEQ ID NO: 3277 - DNA, 51 bp, synthetic construct
  misc_feature 1..51: note = Synthetic polynucleotide
  source 1..51: mol_type = other DNA
agccattgcttttctcattatccacrggccacttcttctgcagagccctgt

SEQ ID NO: 3278 - DNA, 51 bp, synthetic construct
  misc_feature 1..51: note = Synthetic polynucleotide
  source 1..51: mol_type = other DNA
agcatgggagatgatttatctttcartctcaatggttaaggattgaggaag

SEQ ID NO: 3279 - DNA, 51 bp, synthetic construct
  misc_feature 1..51: note = Synthetic polynucleotide
  source 1..51: mol_type = other DNA
gcacaagaaggaccacccggattacragtaccagccgcggcggaggaagtc

SEQ ID NO: 3280 - DNA, 51 bp, synthetic construct
  misc_feature 1..51: note = Synthetic polynucleotide
  source 1..51: mol_type = other DNA
gtttactgccttcttaatgctttccrggaaccagatcctgaattgccagtg

SEQ ID NO: 3281 - DNA, 51 bp, synthetic construct
  misc_feature 1..51: note = Synthetic polynucleotide
  source 1..51: mol_type = other DNA
gaatggctactgggtggtgataatgdtgaaggaaaatgagtaccaggcgtc

SEQ ID NO: 3282 - DNA, 51 bp, synthetic construct
  misc_feature 1..51: note = Synthetic polynucleotide
  source 1..51: mol_type = other DNA
ggctactgggtggtgataatgatgadggaaaatgagtaccaggcgtccagc

SEQ ID NO: 3283 - DNA, 51 bp, synthetic construct
  misc_feature 1..51: note = Synthetic polynucleotide
  source 1..51: mol_type = other DNA
gtgcacaaacagttctatttgttttrtaattttgaatattggtttttacct

SEQ ID NO: 3284 - DNA, 51 bp, synthetic construct
  misc_feature 1..51: note = Synthetic polynucleotide
  source 1..51: mol_type = other DNA
tcaatgttccaggtctctggacactrtgggcacacgactcctcccagctct

SEQ ID NO: 3285 - DNA, 51 bp, synthetic construct
  misc_feature 1..51: note = Synthetic polynucleotide
  source 1..51: mol_type = other DNA
tggccaactgtggatgcttcctattdtggtggtcgaggggttggaggaatt

SEQ ID NO: 3286 - DNA, 51 bp, synthetic construct
  misc_feature 1..51: note = Synthetic polynucleotide
  source 1..51: mol_type = other DNA
tataaaattatagagaaagttgattrcccccgggatgaaaatggagaaatt

SEQ ID NO: 3287 - DNA, 51 bp, synthetic construct
  misc_feature 1..51: note = Synthetic polynucleotide
  source 1..51: mol_type = other DNA
atctttggaggaacccatgggaatgrgctaaccggagtatttctggttaag

SEQ ID NO: 3288 - DNA, 51 bp, synthetic construct
  misc_feature 1..51: note = Synthetic polynucleotide
  source 1..51: mol_type = other DNA
tggcattgtttctaagaacttcacaragaaaatccagtaagtaacctggag

SEQ ID NO: 3289 - DNA, 51 bp, synthetic construct
  misc_feature 1..51: note = Synthetic polynucleotide
  source 1..51: mol_type = other DNA
cagtacctgatgagtgctggtgccarcatctccacctgggtctacagtagc

SEQ ID NO: 3290 - DNA, 51 bp, synthetic construct
  misc_feature 1..51: note = Synthetic polynucleotide
  source 1..51: mol_type = other DNA
tgtccctcatgccggcctggattttytttttttttttttttgagggatggg

SEQ ID NO: 3291 - DNA, 51 bp, synthetic construct
  misc_feature 1..51: note = Synthetic polynucleotide
  source 1..51: mol_type = other DNA
cgggtcacatggcccgcgggacaacrtggctgcgcccgcactagggctggt

SEQ ID NO: 3292 - DNA, 51 bp, synthetic construct
  misc_feature 1..51: note = Synthetic polynucleotide
  source 1..51: mol_type = other DNA
ggccgcgggagccgcacgcggcgatrtggaagaggagggcaagaagggcaa

SEQ ID NO: 3293 - DNA, 51 bp, synthetic construct
  misc_feature 1..51: note = Synthetic polynucleotide
  source 1..51: mol_type = other DNA
gactggattagtatcccactggtgtrtacacaggtgaggactaggctggtg

SEQ ID NO: 3294 - DNA, 51 bp, synthetic construct
  misc_feature 1..51: note = Synthetic polynucleotide
  source 1..51: mol_type = other DNA
actcagtgtggacacctgtatgcctrcgactggattagtatcccactggtg

SEQ ID NO: 3295 - DNA, 51 bp, synthetic construct
  misc_feature 1..51: note = Synthetic polynucleotide
  source 1..51: mol_type = other DNA
tgtaatgcaggtaatgaatttgggcrtcctgaatggttagacttcccaaga

SEQ ID NO: 3296 - DNA, 51 bp, synthetic construct
  misc_feature 1..51: note = Synthetic polynucleotide
  source 1..51: mol_type = other DNA
ggtcttcttttcattttcaacttccrtccaagcaagagctacactgactac

SEQ ID NO: 3297 - DNA, 51 bp, synthetic construct
  misc_feature 1..51: note = Synthetic polynucleotide
  source 1..51: mol_type = other DNA
cttctgccctgggccctgcttatcartgaatccaaatgggacctctggcta

SEQ ID NO: 3298 - DNA, 51 bp, synthetic construct
  misc_feature 1..51: note = Synthetic polynucleotide
  source 1..51: mol_type = other DNA
gaagtgaaagaagcatacatgggtartgttctacaaggaggtgaaggacaa

SEQ ID NO: 3299 - DNA, 51 bp, synthetic construct
  misc_feature 1..51: note = Synthetic polynucleotide
  source 1..51: mol_type = other DNA
catattacttcattgctggggcccartggagctgggaaaactactaccatg

SEQ ID NO: 3300 - DNA, 51 bp, synthetic construct
  misc_feature 1..51: note = Synthetic polynucleotide
  source 1..51: mol_type = other DNA
aaggggcgtgccaagcgacgacgacrgcagcaggtgctgcccctggatccc

SEQ ID NO: 3301 - DNA, 51 bp, synthetic construct
  misc_feature 1..51: note = Synthetic polynucleotide
  source 1..51: mol_type = other DNA
agtctgaacgctgtatccttggtcarcctggtgatggtgagtcctcataca

SEQ ID NO: 3302 - DNA, 51 bp, synthetic construct
  misc_feature 1..51: note = Synthetic polynucleotide
  source 1..51: mol_type = other DNA
ccctccagtgtgttttatgtcttctrcgaacagtacctgaccatcattgac

SEQ ID NO: 3303 - DNA, 51 bp, synthetic construct
  misc_feature 1..51: note = Synthetic polynucleotide
  source 1..51: mol_type = other DNA
ctccgcctcatctctctcaatatgartttttgttcccgtgagaacttctgg

SEQ ID NO: 3304 - DNA, 51 bp, synthetic construct
  misc_feature 1..51: note = Synthetic polynucleotide
  source 1..51: mol_type = other DNA
tctgactgctaatgagaagagcaccrtgcaggaactcaattctcggctggc

SEQ ID NO: 3305 - DNA, 51 bp, synthetic construct
  misc_feature 1..51: note = Synthetic polynucleotide
  source 1..51: mol_type = other DNA
gagaagagcaccatgcaggaactcadttctcggctggcctcttacttggat

SEQ ID NO: 3306 - DNA, 51 bp, synthetic construct
  misc_feature 1..51: note = Synthetic polynucleotide
  source 1..51: mol_type = other DNA
acaggtctgacaacagagcccattcrtaaggaaagtggaccaggagaagaa

SEQ ID NO: 3307 - DNA, 51 bp, synthetic construct
  misc_feature 1..51: note = Synthetic polynucleotide
  source 1..51: mol_type = other DNA
gaggaaatatatattctctgtaagartggccctagtaaattgccttaaaac

SEQ ID NO: 3308 - DNA, 51 bp, synthetic construct
  misc_feature 1..51: note = Synthetic polynucleotide
  source 1..51: mol_type = other DNA
gctctcctgaaaagagccaaagaggragtaggtctccttagggaacataaa

SEQ ID NO: 3309 - DNA, 51 bp, synthetic construct
  misc_feature 1..51: note = Synthetic polynucleotide
  source 1..51: mol_type = other DNA
tattaggtggaccacacaggagaatrtggaaatctggtgactatacagtca

SEQ ID NO: 3310 - DNA, 51 bp, synthetic construct
  misc_feature 1..51: note = Synthetic polynucleotide
  source 1..51: mol_type = other DNA
gagggggtttgtgcctgataacgtartaacaccagtggagacttgcagatg

SEQ ID NO: 3311 - DNA, 51 bp, synthetic construct
  misc_feature 1..51: note = Synthetic polynucleotide
  source 1..51: mol_type = other DNA
gccctggctggggccccactgcccartgtcaccttggatggctttgacctc

SEQ ID NO: 3312 - DNA, 51 bp, synthetic construct
  misc_feature 1..51: note = Synthetic polynucleotide
  source 1..51: mol_type = other DNA
catcgtcctggtctgcctcatcttcrgcgtgctgtccaccatcgagcagta

SEQ ID NO: 3313 - DNA, 51 bp, synthetic construct
  misc_feature 1..51: note = Synthetic polynucleotide
  source 1..51: mol_type = other DNA
gagttatcaagagatatgaatgcatrcatcaggccatctcctactagagga

SEQ ID NO: 3314 - DNA, 51 bp, synthetic construct
  misc_feature 1..51: note = Synthetic polynucleotide
  source 1..51: mol_type = other DNA
agtctacacagcacaatgaccccccrtggacctgatgctgactgctttgag

SEQ ID NO: 3315 - DNA, 51 bp, synthetic construct
  misc_feature 1..51: note = Synthetic polynucleotide
  source 1..51: mol_type = other DNA
agggggagggagtctacacagcacartgaccccccatggacctgatgctga

SEQ ID NO: 3316 - DNA, 51 bp, synthetic construct
  misc_feature 1..51: note = Synthetic polynucleotide
  source 1..51: mol_type = other DNA
ctgagcttgaagatccaggagctcartggtcttgccctgccccagcatgag

SEQ ID NO: 3317 - DNA, 51 bp, synthetic construct
  misc_feature 1..51: note = Synthetic polynucleotide
  source 1..51: mol_type = other DNA
gtaaaacttgatgtttttttcttctrtgaagaaactgatcacatgtggaat

SEQ ID NO: 3318 - DNA, 51 bp, synthetic construct
  misc_feature 1..51: note = Synthetic polynucleotide
  source 1..51: mol_type = other DNA
gcttgagaagagcatggctgggaagyagtggtggaagtagaggacccggcc

SEQ ID NO: 3319 - DNA, 51 bp, synthetic construct
  misc_feature 1..51: note = Synthetic polynucleotide
  source 1..51: mol_type = other DNA
ccaagtaacccctactgcgcctgctrcatgtctctcttccaggtgaacggc

SEQ ID NO: 3320 - DNA, 51 bp, synthetic construct
  misc_feature 1..51: note = Synthetic polynucleotide
  source 1..51: mol_type = other DNA
cctggacttctggagggtgctgttcraggactacaacctggagcgctatgg

SEQ ID NO: 3321 - DNA, 51 bp, synthetic construct
  misc_feature 1..51: note = Synthetic polynucleotide
  source 1..51: mol_type = other DNA
tcgtctgctagcgctcttcagatccrcgagcggactcacactggagagaag

SEQ ID NO: 3322 - DNA, 51 bp, synthetic construct
  misc_feature 1..51: note = Synthetic polynucleotide
  source 1..51: mol_type = other DNA
cagttactggaggattctacctcagrtgaagataggagcagctccagttcc

SEQ ID NO: 3323 - DNA, 51 bp, synthetic construct
  misc_feature 1..51: note = Synthetic polynucleotide
  source 1..51: mol_type = other DNA
ttccttgggctgcgagcttttcaccrccataggtaaatttttcaataaaag

SEQ ID NO: 3324 - DNA, 51 bp, synthetic construct
  misc_feature 1..51: note = Synthetic polynucleotide
  source 1..51: mol_type = other DNA
cccaaagagttctaccacgaggtgcvcaggccctctcacttcctcaacttt

SEQ ID NO: 3325 - DNA, 51 bp, synthetic construct
  misc_feature 1..51: note = Synthetic polynucleotide
  source 1..51: mol_type = other DNA
tctggccgcagcaatgccatgccacrtattaagacatatatgaggccttct

SEQ ID NO: 3326 - DNA, 51 bp, synthetic construct
  misc_feature 1..51: note = Synthetic polynucleotide
  source 1..51: mol_type = other DNA
agccaggagaagatcttctgtggccrgatctggcctgtggatcagcagctc

SEQ ID NO: 3327 - DNA, 51 bp, synthetic construct
  misc_feature 1..51: note = Synthetic polynucleotide
  source 1..51: mol_type = other DNA
accacaggtttgcctctctcctcacrgcccccagtccccagccagacctcc

SEQ ID NO: 3328 - DNA, 51 bp, synthetic construct
  misc_feature 1..51: note = Synthetic polynucleotide
  source 1..51: mol_type = other DNA
cagtcagccaatgggcacctcgggcrccacttcaacaggtgagccactgct

SEQ ID NO: 3329 - DNA, 51 bp, synthetic construct
  misc_feature 1..51: note = Synthetic polynucleotide
  source 1..51: mol_type = other DNA
tgtcagcgaaagttctcccggtccgrccacctgaagacccacaccaggact

SEQ ID NO: 3330 - DNA, 51 bp, synthetic construct
  misc_feature 1..51: note = Synthetic polynucleotide
  source 1..51: mol_type = other DNA
ttgcagccacagcacagggtacgagrgcgataaccacacaacgcccatcct

SEQ ID NO: 3331 - DNA, 51 bp, synthetic construct
  misc_feature 1..51: note = Synthetic polynucleotide
  source 1..51: mol_type = other DNA
ccaggcctccacttctacaccctcarccgcgagatggctaccacagaggtg

SEQ ID NO: 3332 - DNA, 51 bp, synthetic construct
  misc_feature 1..51: note = Synthetic polynucleotide
  source 1..51: mol_type = other DNA
taactcattctagctagttcaacttycattgccatttcagccagcataaat

SEQ ID NO: 3333 - DNA, 51 bp, synthetic construct
  misc_feature 1..51: note = Synthetic polynucleotide
  source 1..51: mol_type = other DNA
tattaatggtcagaagatgtggatarccaacggaggaaaagctaattggta

SEQ ID NO: 3334 - DNA, 51 bp, synthetic construct
  misc_feature 1..51: note = Synthetic polynucleotide
  source 1..51: mol_type = other DNA
aggatcagaggctggggccaactggraccattggcagctgcacgctcatta

SEQ ID NO: 3335 - DNA, 51 bp, synthetic construct
  misc_feature 1..51: note = Synthetic polynucleotide
  source 1..51: mol_type = other DNA
tgttctaacccccacccccactgccrggtaagggtgtcaggggctccagtg

SEQ ID NO: 3336 - DNA, 51 bp, synthetic construct
  misc_feature 1..51: note = Synthetic polynucleotide
  source 1..51: mol_type = other DNA
gttgcacatcccggtgatggtgcggyatttgtcctgctccgggcaagtcac

SEQ ID NO: 3337 - DNA, 51 bp, synthetic construct
  misc_feature 1..51: note = Synthetic polynucleotide
  source 1..51: mol_type = other DNA
ttggattttggggcaacgcgggaatrtgacagatccttcaccgacctctac

SEQ ID NO: 3338 - DNA, 51 bp, synthetic construct
  misc_feature 1..51: note = Synthetic polynucleotide
  source 1..51: mol_type = other DNA
cacactggtgcagaacctggtcaacratggctacgtgcgggacgagactgt

SEQ ID NO: 3339 - DNA, 51 bp, synthetic construct
  misc_feature 1..51: note = Synthetic polynucleotide
  source 1..51: mol_type = other DNA
ggctacttgcctgtggtcatcgatarcttccataatgccttccgtggtgag

SEQ ID NO: 3340 - DNA, 51 bp, synthetic construct
  misc_feature 1..51: note = Synthetic polynucleotide
  source 1..51: mol_type = other DNA
ggcgagtcggtgcagaagcctctggrttattacagagttaacctgaccggg

SEQ ID NO: 3341 - DNA, 51 bp, synthetic construct
  misc_feature 1..51: note = Synthetic polynucleotide
  source 1..51: mol_type = other DNA
aagggccacattgcagccttaaggargctgaaagaacagtgtggctgccgg

SEQ ID NO: 3342 - DNA, 51 bp, synthetic construct
  misc_feature 1..51: note = Synthetic polynucleotide
  source 1..51: mol_type = other DNA
agcatcaactttgacaaccccgtctrtcagaagaccacagaggatgaggtc

SEQ ID NO: 3343 - DNA, 51 bp, synthetic construct
  misc_feature 1..51: note = Synthetic polynucleotide
  source 1..51: mol_type = other DNA
attgcaccactcaacattgttttgtrtaatgtctttactcctcatggacct

SEQ ID NO: 3344 - DNA, 51 bp, synthetic construct
  misc_feature 1..51: note = Synthetic polynucleotide
  source 1..51: mol_type = other DNA
tgaagattacgggggactcatttttrccagccccagagcagtggaagcagc

SEQ ID NO: 3345 - DNA, 51 bp, synthetic construct
  misc_feature 1..51: note = Synthetic polynucleotide
  source 1..51: mol_type = other DNA
gaatgctgtccaccgtggagcggggrcaggagtccctgtggccagctttca

SEQ ID NO: 3346 - DNA, 51 bp, synthetic construct
  misc_feature 1..51: note = Synthetic polynucleotide
  source 1..51: mol_type = other DNA
agaccttgtgaggactagaggaagartgctcctggctgttttgtactgcct

SEQ ID NO: 3347 - DNA, 51 bp, synthetic construct
  misc_feature 1..51: note = Synthetic polynucleotide
  source 1..51: mol_type = other DNA
gtcgccatggtgggggatggggtcadtgactccccggccttggcccaggca

SEQ ID NO: 3348 - DNA, 51 bp, synthetic construct
  misc_feature 1..51: note = Synthetic polynucleotide
  source 1..51: mol_type = other DNA
ctccgagaggggagaccagcgggccvtgacaagctccaggctttggttttc

SEQ ID NO: 3349 - DNA, 51 bp, synthetic construct
  misc_feature 1..51: note = Synthetic polynucleotide
  source 1..51: mol_type = other DNA
aataaattgaacgtgttccactggcrtctggtagatgatccttccttccca

SEQ ID NO: 3350 - DNA, 51 bp, synthetic construct
  misc_feature 1..51: note = Synthetic polynucleotide
  source 1..51: mol_type = other DNA
cagcccgtaacccttctggacatctrtacacactggcaacagtaagtggtg

SEQ ID NO: 3351 - DNA, 51 bp, synthetic construct
  misc_feature 1..51: note = Synthetic polynucleotide
  source 1..51: mol_type = other DNA
atgctttttttccacctaatcccctrgagtggtgtcttaactgtcaaactg

SEQ ID NO: 3352 - DNA, 51 bp, synthetic construct
  misc_feature 1..51: note = Synthetic polynucleotide
  source 1..51: mol_type = other DNA
gcctagcagctgtccaaagtacaccyggtggtcagcaggatgcaggcccag

SEQ ID NO: 3353 - DNA, 51 bp, synthetic construct
  misc_feature 1..51: note = Synthetic polynucleotide
  source 1..51: mol_type = other DNA
taattctaatggaattaagcctgtcrtggaacaatatggtctcatccctga

SEQ ID NO: 3354 - DNA, 51 bp, synthetic construct
  misc_feature 1..51: note = Synthetic polynucleotide
  source 1..51: mol_type = other DNA
acttcttaccaaacttaacggcaccrtaaccacccctggctggcccaagga

SEQ ID NO: 3355 - DNA, 51 bp, synthetic construct
  misc_feature 1..51: note = Synthetic polynucleotide
  source 1..51: mol_type = other DNA
ggaaatgtatgccattggcttttgtratatcatcccttccttcttccactg

SEQ ID NO: 3356 - DNA, 51 bp, synthetic construct
  misc_feature 1..51: note = Synthetic polynucleotide
  source 1..51: mol_type = other DNA
cctgtccacaatgcctgtcttgtacrtgatcgtgtccctcccaccatcttt

SEQ ID NO: 3357 - DNA, 51 bp, synthetic construct
  misc_feature 1..51: note = Synthetic polynucleotide
  source 1..51: mol_type = other DNA
gaagcaaggtgtggacgtcaaggccrtgacctctaatgtggccagtgtgca

SEQ ID NO: 3358 - DNA, 51 bp, synthetic construct
  misc_feature 1..51: note = Synthetic polynucleotide
  source 1..51: mol_type = other DNA
aacgttccgtttctaacttttattarcaaattggaccgaatgggctccaac

SEQ ID NO: 3359 - DNA, 51 bp, synthetic construct
  misc_feature 1..51: note = Synthetic polynucleotide
  source 1..51: mol_type = other DNA
gtgggcgacacgcccgcctacctctrcgaggagcgctggacgcccccctgc

SEQ ID NO: 3360 - DNA, 51 bp, synthetic construct
  misc_feature 1..51: note = Synthetic polynucleotide
  source 1..51: mol_type = other DNA
tgccggcttcgtggcgcaggcgcctracaactaccgccgcttcctggagct

SEQ ID NO: 3361 - DNA, 51 bp, synthetic construct
  misc_feature 1..51: note = Synthetic polynucleotide
  source 1..51: mol_type = other DNA
tccttttcctctacagggctccgagragggtgcagtgaggcccacagcctt

SEQ ID NO: 3362 - DNA, 51 bp, synthetic construct
  misc_feature 1..51: note = Synthetic polynucleotide
  source 1..51: mol_type = other DNA
ccagccgaccacatggtacaggaggbtctagggtaaggacaaaggcaaaga

SEQ ID NO: 3363 - DNA, 51 bp, synthetic construct
  misc_feature 1..51: note = Synthetic polynucleotide
  source 1..51: mol_type = other DNA
acatcacccacttggctcaagaccartggagcggtgaatgggaaggggtca

SEQ ID NO: 3364 - DNA, 51 bp, synthetic construct
  misc_feature 1..51: note = Synthetic polynucleotide
  source 1..51: mol_type = other DNA
aaatatgttcatggcattgctgtacrttggtacctggactttctggctcca

SEQ ID NO: 3365 - DNA, 51 bp, synthetic construct
  misc_feature 1..51: note = Synthetic polynucleotide
  source 1..51: mol_type = other DNA
gtgaatttgtccaaagcaggtattgrgacaactgtcatgactgatgctgcc

SEQ ID NO: 3366 - DNA, 51 bp, synthetic construct
  misc_feature 1..51: note = Synthetic polynucleotide
  source 1..51: mol_type = other DNA
ctacagaacgtcagaaaacacatccrttcctgtttcaccaacatttcctgt

SEQ ID NO: 3367 - DNA, 51 bp, synthetic construct
  misc_feature 1..51: note = Synthetic polynucleotide
  source 1..51: mol_type = other DNA
gaagctattccgaggggtgaagaagrtgggtggggaagaatttagccggcg

SEQ ID NO: 3368 - DNA, 51 bp, synthetic construct
  misc_feature 1..51: note = Synthetic polynucleotide
  source 1..51: mol_type = other DNA
ttctggtctgaccgtcgcaaccctcrtgaagtacaaccagcatatgctaca

SEQ ID NO: 3369 - DNA, 51 bp, synthetic construct
  misc_feature 1..51: note = Synthetic polynucleotide
  source 1..51: mol_type = other DNA
gtcaccgcctccaccacccaggggtrtgtccgcttcgagggaggcgccggg

SEQ ID NO: 3370 - DNA, 51 bp, synthetic construct
  misc_feature 1..51: note = Synthetic polynucleotide
  source 1..51: mol_type = other DNA
ctgcagatccagcccagccagctggrattgttctactgtttgtacgagatg

SEQ ID NO: 3371 - DNA, 51 bp, synthetic construct
  misc_feature 1..51: note = Synthetic polynucleotide
  source 1..51: mol_type = other DNA
cttattgacgttactttttgctcctrgacaaagtggctacgagctataagc

SEQ ID NO: 3372 - DNA, 51 bp, synthetic construct
  misc_feature 1..51: note = Synthetic polynucleotide
  source 1..51: mol_type = other DNA
gataaatacccaaaggcccgttaccrttggctggtcttaccgtggacctcc

SEQ ID NO: 3373 - DNA, 51 bp, synthetic construct
  misc_feature 1..51: note = Synthetic polynucleotide
  source 1..51: mol_type = other DNA
catcccaatgtcaaagttgtgtccarttttatggattttgatgaaactgta

SEQ ID NO: 3374 - DNA, 51 bp, synthetic construct
  misc_feature 1..51: note = Synthetic polynucleotide
  source 1..51: mol_type = other DNA
ccggcagccgccgccagccgcagccrtgggccgggcccggccgggccaacg

SEQ ID NO: 3375 - DNA, 51 bp, synthetic construct
  misc_feature 1..51: note = Synthetic polynucleotide
  source 1..51: mol_type = other DNA
tcactctgctccttccctgttgccartgtctcgctgactaagggtggacgt

SEQ ID NO: 3376 - DNA, 51 bp, synthetic construct
  misc_feature 1..51: note = Synthetic polynucleotide
  source 1..51: mol_type = other DNA
ggtatattttgaacccaaagacatcrctgctgaagaagaagaggaagaagt

SEQ ID NO: 3377 - DNA, 51 bp, synthetic construct
  misc_feature 1..51: note = Synthetic polynucleotide
  source 1..51: mol_type = other DNA
tgccttggtgattcagaccatcatgrctgtgattgtagtagatcagagagg

SEQ ID NO: 3378 - DNA, 51 bp, synthetic construct
  misc_feature 1..51: note = Synthetic polynucleotide
  source 1..51: mol_type = other DNA
tatcccatatttatctggaccagatraaaacctgaccagtgcagaggtaag

SEQ ID NO: 3379 - DNA, 51 bp, synthetic construct
  misc_feature 1..51: note = Synthetic polynucleotide
  source 1..51: mol_type = other DNA
cagacagctgactgcctggttaatgytgagaagagaaacatcagattccag

SEQ ID NO: 3380 - DNA, 51 bp, synthetic construct
  misc_feature 1..51: note = Synthetic polynucleotide
  source 1..51: mol_type = other DNA
tttatgagaaattcttttatgttttrgataaatgcctgtagtcattatggc

SEQ ID NO: 3381 - DNA, 51 bp, synthetic construct
  misc_feature 1..51: note = Synthetic polynucleotide
  source 1..51: mol_type = other DNA
tgaccttcggtcctgggaagccgccvagttgtttgcacgaaaactgaaccc

SEQ ID NO: 3382 - DNA, 51 bp, synthetic construct
  misc_feature 1..51: note = Synthetic polynucleotide
  source 1..51: mol_type = other DNA
acaatgcaacatgcagtctacgtctrtgacatttgtcatgtgatcatcgac

SEQ ID NO: 3383 - DNA, 51 bp, synthetic construct
  misc_feature 1..51: note = Synthetic polynucleotide
  source 1..51: mol_type = other DNA
acctgcccccaggtctggttccagarccgcagagccaagtggcggaagcgc

SEQ ID NO: 3384 - DNA, 51 bp, synthetic construct
  misc_feature 1..51: note = Synthetic polynucleotide
  source 1..51: mol_type = other DNA
ttccaggacagtgttcataaaaatcrtcgttacaaggtaagaaaatataac

SEQ ID NO: 3385 - DNA, 51 bp, synthetic construct
  misc_feature 1..51: note = Synthetic polynucleotide
  source 1..51: mol_type = other DNA
ctagtcctgaacccatcagcaataarcgtgagttcacacgagcttcgcgca

SEQ ID NO: 3386 - DNA, 51 bp, synthetic construct
  misc_feature 1..51: note = Synthetic polynucleotide
  source 1..51: mol_type = other DNA
cctggaataaacttgaagaaaatacrttatgatagcatcaaactttatgag

SEQ ID NO: 3387 - DNA, 51 bp, synthetic construct
  misc_feature 1..51: note = Synthetic polynucleotide
  source 1..51: mol_type = other DNA
gcttacttgcagagcattacccctcrggggtactctgactcggaggagagg

SEQ ID NO: 3388 - DNA, 51 bp, synthetic construct
  misc_feature 1..51: note = Synthetic polynucleotide
  source 1..51: mol_type = other DNA
gttgtcatccagtctcttccttaggrattcattgcctttgggatcagcaac

SEQ ID NO: 3389 - DNA, 51 bp, synthetic construct
  misc_feature 1..51: note = Synthetic polynucleotide
  source 1..51: mol_type = other DNA
ttatgctattgcagtgtcagtaggaraagtatatgccaccaagtatgatta

SEQ ID NO: 3390 - DNA, 51 bp, synthetic construct
  misc_feature 1..51: note = Synthetic polynucleotide
  source 1..51: mol_type = other DNA
aaggacacattctttttgacggtccrtgatgctatactctatctacagaac

SEQ ID NO: 3391 - DNA, 51 bp, synthetic construct
  misc_feature 1..51: note = Synthetic polynucleotide
  source 1..51: mol_type = other DNA
tttttaacatcttttgttttatttcrgacgataattgctactgccatttca

SEQ ID NO: 3392 - DNA, 51 bp, synthetic construct
  misc_feature 1..51: note = Synthetic polynucleotide
  source 1..51: mol_type = other DNA
gaccccatatgctgtctcgactgcartgacaaagtatctaaatacaaatgt

SEQ ID NO: 3393 - DNA, 51 bp, synthetic construct
  misc_feature 1..51: note = Synthetic polynucleotide
  source 1..51: mol_type = other DNA
ttgttttgcttctttctgccagtcarcaatgtcggaatgcttccaaacctt

SEQ ID NO: 3394 - DNA, 51 bp, synthetic construct
  misc_feature 1..51: note = Synthetic polynucleotide
  source 1..51: mol_type = other DNA
gttttgatcttagtgtttattacagraaatgaagccatatctcactaacta

SEQ ID NO: 3395 - DNA, 51 bp, synthetic construct
  misc_feature 1..51: note = Synthetic polynucleotide
  source 1..51: mol_type = other DNA
ctaaataaacattttccttatcaggrttcagagaagatgtgcattgaaatt

SEQ ID NO: 3396 - DNA, 51 bp, synthetic construct
  misc_feature 1..51: note = Synthetic polynucleotide
  source 1..51: mol_type = other DNA
ctgcatgcgctggtggccattgctgrcaacacccgtgagaacaccaagttt

SEQ ID NO: 3397 - DNA, 51 bp, synthetic construct
  misc_feature 1..51: note = Synthetic polynucleotide
  source 1..51: mol_type = other DNA
ttaaaaaaagttgcagctactttgcragtgccagtaaatgatttaaatgca

SEQ ID NO: 3398 - DNA, 51 bp, synthetic construct
  misc_feature 1..51: note = Synthetic polynucleotide
  source 1..51: mol_type = other DNA
tggcgcaccccatcagaccatctacrgtgagtagggcttcaggctgggaag

SEQ ID NO: 3399 - DNA, 51 bp, synthetic construct
  misc_feature 1..51: note = Synthetic polynucleotide
  source 1..51: mol_type = other DNA
gggctgtatcgaattgtgggtgtcavctccagagtgcagaagttgctgagt

SEQ ID NO: 3400 - DNA, 51 bp, synthetic construct
  misc_feature 1..51: note = Synthetic polynucleotide
  source 1..51: mol_type = other DNA
cgctcctacagccacgtggtgctcarggaggtgcgcttcttcaacctgcag

SEQ ID NO: 3401 - DNA, 51 bp, synthetic construct
  misc_feature 1..51: note = Synthetic polynucleotide
  source 1..51: mol_type = other DNA
tgcgacatggacgtgtttgatgcctrtctgccttggcgccgcaacctgtcc

SEQ ID NO: 3402 - DNA, 51 bp, synthetic construct
  misc_feature 1..51: note = Synthetic polynucleotide
  source 1..51: mol_type = other DNA
cttgaaactgaatggaagaataactrtcctcgcctgcgggaacttgaccgg

SEQ ID NO: 3403 - DNA, 51 bp, synthetic construct
  misc_feature 1..51: note = Synthetic polynucleotide
  source 1..51: mol_type = other DNA
agtatcttcactcccagtccttgtaraattccacctccgacgagagtgggc

SEQ ID NO: 3404 - DNA, 51 bp, synthetic construct
  misc_feature 1..51: note = Synthetic polynucleotide
  source 1..51: mol_type = other DNA
ccgcgccggggtgcaaatagccatcrtgaccttcaaaggtgcgaaagggcc

SEQ ID NO: 3405 - DNA, 51 bp, synthetic construct
  misc_feature 1..51: note = Synthetic polynucleotide
  source 1..51: mol_type = other DNA
acaggccctccccttctctgcccacrgtacctggcgttgcctgacgtgtca

SEQ ID NO: 3406 - DNA, 51 bp, synthetic construct
  misc_feature 1..51: note = Synthetic polynucleotide
  source 1..51: mol_type = other DNA
aggaactcctgcaataacttcatctrtggaggctgccggggcaataagaac

SEQ ID NO: 3407 - DNA, 51 bp, synthetic construct
  misc_feature 1..51: note = Synthetic polynucleotide
  source 1..51: mol_type = other DNA
gggagggctggggtttctcagggtcrgggggtccccaaggagtagccaggg

SEQ ID NO: 3408 - DNA, 51 bp, synthetic construct
  misc_feature 1..51: note = Synthetic polynucleotide
  source 1..51: mol_type = other DNA
aggggccaggcttggccaggagggasatcaggcctgggtcttgccttcact

SEQ ID NO: 3409 - DNA, 51 bp, synthetic construct
  misc_feature 1..51: note = Synthetic polynucleotide
  source 1..51: mol_type = other DNA
gggcaggagagcacagacacggagcrggcccctggcaaggacactttctac

SEQ ID NO: 3410 - DNA, 51 bp, synthetic construct
  misc_feature 1..51: note = Synthetic polynucleotide
  source 1..51: mol_type = other DNA
agcctggacattaccttccgctccgrctactccaacgagaagcygttcacg

SEQ ID NO: 3411 - DNA, 51 bp, synthetic construct
  misc_feature 1..51: note = Synthetic polynucleotide
  source 1..51: mol_type = other DNA
gctctgcctcccatagaccccctggrtcaccgggatgctggagatctctgg

SEQ ID NO: 3412 - DNA, 51 bp, synthetic construct
  misc_feature 1..51: note = Synthetic polynucleotide
  source 1..51: mol_type = other DNA
agcactacagagcagttggggtatgrtgggcatgttagccagccagcagaa

SEQ ID NO: 3413 - DNA, 51 bp, synthetic construct
  misc_feature 1..51: note = Synthetic polynucleotide
  source 1..51: mol_type = other DNA
gtaatgtcacagcgacatatgatagrtggacgatggtgtgactgcaaactt

SEQ ID NO: 3414 - DNA, 51 bp, synthetic construct
  misc_feature 1..51: note = Synthetic polynucleotide
  source 1..51: mol_type = other DNA
ggtatgatgggcatgttagccagccrgcagaaccagtcaggcccatcgggt

SEQ ID NO: 3415 - DNA, 51 bp, synthetic construct
  misc_feature 1..51: note = Synthetic polynucleotide
  source 1..51: mol_type = other DNA
cgttcatatatccaatgccgaacctragcacaatagcaatagacagttaga

SEQ ID NO: 3416 - DNA, 51 bp, synthetic construct
  misc_feature 1..51: note = Synthetic polynucleotide
  source 1..51: mol_type = other DNA
atcaacagtaacctgaaatttgcagrggttagtgatactcacctgtggtat

SEQ ID NO: 3417 - DNA, 51 bp, synthetic construct
  misc_feature 1..51: note = Synthetic polynucleotide
  source 1..51: mol_type = other DNA
aatcaactctgggctggcctgggctrctattctcgtggccggcggctgcag

SEQ ID NO: 3418 - DNA, 51 bp, synthetic construct
  misc_feature 1..51: note = Synthetic polynucleotide
  source 1..51: mol_type = other DNA
tccgtgacctgggagccctcagagcrgcttcagcgcaaggccctgctgcag

SEQ ID NO: 3419 - DNA, 51 bp, synthetic construct
  misc_feature 1..51: note = Synthetic polynucleotide
  source 1..51: mol_type = other DNA
ttgaaaagaattgtaacatcatgctrtggcccctcaggtaggctgaagcag

SEQ ID NO: 3420 - DNA, 51 bp, synthetic construct
  misc_feature 1..51: note = Synthetic polynucleotide
  source 1..51: mol_type = other DNA
tggctttggaggttacgtgtgtacarcctcacagtcctcagctctgctcag

SEQ ID NO: 3421 - DNA, 51 bp, synthetic construct
  misc_feature 1..51: note = Synthetic polynucleotide
  source 1..51: mol_type = other DNA
gtgcagcccgtggtcaccctgtaccrctgggacctgccccagcgcctgcag

SEQ ID NO: 3422 - DNA, 51 bp, synthetic construct
  misc_feature 1..51: note = Synthetic polynucleotide
  source 1..51: mol_type = other DNA
cttttcttttttttgccctgcctggrtacctaccacaaggttgaccttcgt

SEQ ID NO: 3423 - DNA, 51 bp, synthetic construct
  misc_feature 1..51: note = Synthetic polynucleotide
  source 1..51: mol_type = other DNA
cacctcctgactaaagcgctccaccbaagaagataaggaaaatagatatat

SEQ ID NO: 3424 - DNA, 51 bp, synthetic construct
  misc_feature 1..51: note = Synthetic polynucleotide
  source 1..51: mol_type = other DNA
gaagtatctttgttttcattcacccrggaatgcattcacagaggaggattc

SEQ ID NO: 3425 - DNA, 51 bp, synthetic construct
  misc_feature 1..51: note = Synthetic polynucleotide
  source 1..51: mol_type = other DNA
gctactgcaatcacaatccaaagggrttggattgttgttgttgcaggagaa

SEQ ID NO: 3426 - DNA, 51 bp, synthetic construct
  misc_feature 1..51: note = Synthetic polynucleotide
  source 1..51: mol_type = other DNA
cgtgaacacggcccggcccgacgagraggccataatgacctatgtgtccag

SEQ ID NO: 3427 - DNA, 51 bp, synthetic construct
  misc_feature 1..51: note = Synthetic polynucleotide
  source 1..51: mol_type = other DNA
caaatggggtcatgaagccattgaartgcacagctcttatttccacattgc

SEQ ID NO: 3428 - DNA, 51 bp, synthetic construct
  misc_feature 1..51: note = Synthetic polynucleotide
  source 1..51: mol_type = other DNA
gttttcctaccctgagcgccccatcrtatttctcagtatgtgctataatat

SEQ ID NO: 3429 - DNA, 51 bp, synthetic construct
  misc_feature 1..51: note = Synthetic polynucleotide
  source 1..51: mol_type = other DNA
agtgtttttttccagagaaagctgaytgttaccagcaagacattcttctaa

SEQ ID NO: 3430 - DNA, 51 bp, synthetic construct
  misc_feature 1..51: note = Synthetic polynucleotide
  source 1..51: mol_type = other DNA
cagggtgttacatttccagccatgcrtgccatgtggtcttcttgggctccc

SEQ ID NO: 3431 - DNA, 51 bp, synthetic construct
  misc_feature 1..51: note = Synthetic polynucleotide
  source 1..51: mol_type = other DNA
atgggcctccactaggggaggccatdaggagcgccccacagtcatgctgtt

SEQ ID NO: 3432 - DNA, 51 bp, synthetic construct
  misc_feature 1..51: note = Synthetic polynucleotide
  source 1..51: mol_type = other DNA
agagttgaacaaaaggcaggggtgaytgcacagttttttaagagctcctat

SEQ ID NO: 3433 - DNA, 51 bp, synthetic construct
  misc_feature 1..51: note = Synthetic polynucleotide
  source 1..51: mol_type = other DNA
taagtgcctgacttttatgttttacrgaactaaaaccagaacaggtgaaga

SEQ ID NO: 3434 - DNA, 51 bp, synthetic construct
  misc_feature 1..51: note = Synthetic polynucleotide
  source 1..51: mol_type = other DNA
agtcttatacttgtatttcctctagrtgaagttgatagccttttgtgtgaa

SEQ ID NO: 3435 - DNA, 51 bp, synthetic construct
  misc_feature 1..51: note = Synthetic polynucleotide
  source 1..51: mol_type = other DNA
tgcaagtttaacttcaaaatacgtgrgtgctctgtttccaatattgtcgta

SEQ ID NO: 3436 - DNA, 51 bp, synthetic construct
  misc_feature 1..51: note = Synthetic polynucleotide
  source 1..51: mol_type = other DNA
ctgttactctttggtccacctgggartgggaagacaatgctggtaagggtt

SEQ ID NO: 3437 - DNA, 51 bp, synthetic construct
  misc_feature 1..51: note = Synthetic polynucleotide
  source 1..51: mol_type = other DNA
agaatcgaatgcaaccttctttaatrtaagtgctgcaagtttaacttcaaa

SEQ ID NO: 3438 - DNA, 51 bp, synthetic construct
  misc_feature 1..51: note = Synthetic polynucleotide
  source 1..51: mol_type = other DNA
acacctggatgtggacaacgaccgarccacacccagcgacctggacagcac

SEQ ID NO: 3439 - DNA, 51 bp, synthetic construct
  misc_feature 1..51: note = Synthetic polynucleotide
  source 1..51: mol_type = other DNA
tgcccaattttttactgcttacaagrtattatgcgagtctgtagtgaatcc

SEQ ID NO: 3440 - DNA, 51 bp, synthetic construct
  misc_feature 1..51: note = Synthetic polynucleotide
  source 1..51: mol_type = other DNA
ccaggaaacatcgtgggaatcggccrgtgcctgctgcatggcatgacggtg

SEQ ID NO: 3441 - DNA, 51 bp, synthetic construct
  misc_feature 1..51: note = Synthetic polynucleotide
  source 1..51: mol_type = other DNA
ggaggcctgatcactctctcttcttrcaacaaattccacaacaactgctac

SEQ ID NO: 3442 - DNA, 51 bp, synthetic construct
  misc_feature 1..51: note = Synthetic polynucleotide
  source 1..51: mol_type = other DNA
gacactctaattgtcacctgcaccarcagtgccacaagcatctttgccggc

SEQ ID NO: 3443 - DNA, 51 bp, synthetic construct
  misc_feature 1..51: note = Synthetic polynucleotide
  source 1..51: mol_type = other DNA
gcgttttacaatggactctgggcctrtgatggatggtgaggtgtcctgaga

SEQ ID NO: 3444 - DNA, 51 bp, synthetic construct
  misc_feature 1..51: note = Synthetic polynucleotide
  source 1..51: mol_type = other DNA
gagcctgtgtgtgtcgggcagctgcrgggtaggcgtgtgtggacattggcg

SEQ ID NO: 3445 - DNA, 51 bp, synthetic construct
  misc_feature 1..51: note = Synthetic polynucleotide
  source 1..51: mol_type = other DNA
tgtatttggagctacctctagtatcraaagtggtttagatttgaatacaag

SEQ ID NO: 3446 - DNA, 51 bp, synthetic construct
  misc_feature 1..51: note = Synthetic polynucleotide
  source 1..51: mol_type = other DNA
tccttccctgaccccaggggcctctrccacttctgcctctactggaaccga

SEQ ID NO: 3447 - DNA, 51 bp, synthetic construct
  misc_feature 1..51: note = Synthetic polynucleotide
  source 1..51: mol_type = other DNA
aggaactgagcccttctttaagcagraaagtctgcttctaaagcagaaaca

SEQ ID NO: 3448 - DNA, 51 bp, synthetic construct
  misc_feature 1..51: note = Synthetic polynucleotide
  source 1..51: mol_type = other DNA
catctccttcctcatcgtggtcaacrtgtacatcgccatcatcctggagaa

SEQ ID NO: 3449 - DNA, 51 bp, synthetic construct
  misc_feature 1..51: note = Synthetic polynucleotide
  source 1..51: mol_type = other DNA
cgccctcctaggcgccatcccctccrtcatgaatgtgctgcttgtctgcct

SEQ ID NO: 3450 - DNA, 51 bp, synthetic construct
  misc_feature 1..51: note = Synthetic polynucleotide
  source 1..51: mol_type = other DNA
gttcagcatgttcatcatgatcaccrtcttgaccaactgcgtattcatgac

SEQ ID NO: 3451 - DNA, 51 bp, synthetic construct
  misc_feature 1..51: note = Synthetic polynucleotide
  source 1..51: mol_type = other DNA
cctgactgccacaggtgtacaggaarcatttgtcttttgttgctggaaagc

SEQ ID NO: 3452 - DNA, 51 bp, synthetic construct
  misc_feature 1..51: note = Synthetic polynucleotide
  source 1..51: mol_type = other DNA
cagtgcagagcagcacctgatatccrtgtgtgaggaccatgatcgcatcct

SEQ ID NO: 3453 - DNA, 51 bp, synthetic construct
  misc_feature 1..51: note = Synthetic polynucleotide
  source 1..51: mol_type = other DNA
cctctctccggtccgtgcctccaagdtggtgagtcttcttgcgtggtgagg

SEQ ID NO: 3454 - DNA, 51 bp, synthetic construct
  misc_feature 1..51: note = Synthetic polynucleotide
  source 1..51: mol_type = other DNA
tcaaactaagaagctctccacctccrgtaacaatgatgacaaaattaatgg

SEQ ID NO: 3455 - DNA, 51 bp, synthetic construct
  misc_feature 1..51: note = Synthetic polynucleotide
  source 1..51: mol_type = other DNA
gatgaggaagaagaatgtccatcagrggaaacagacatcatctccaaagga

SEQ ID NO: 3456 - DNA, 51 bp, synthetic construct
  misc_feature 1..51: note = Synthetic polynucleotide
  source 1..51: mol_type = other DNA
aaagtgtttatctcagtctgagcggrcgaccacgtctcccaaaaggctgct

SEQ ID NO: 3457 - DNA, 51 bp, synthetic construct
  misc_feature 1..51: note = Synthetic polynucleotide
  source 1..51: mol_type = other DNA
tctggctcccccttctcctgcctgcrggtcagcatcacggtgatcgaggcc

SEQ ID NO: 3458 - DNA, 51 bp, synthetic construct
  misc_feature 1..51: note = Synthetic polynucleotide
  source 1..51: mol_type = other DNA
gctcgagtgtttcgatcctctccccrgtttggtgttaccttggtcacttat

SEQ ID NO: 3459 - DNA, 51 bp, synthetic construct
  misc_feature 1..51: note = Synthetic polynucleotide
  source 1..51: mol_type = other DNA
aatgccctacagttggcagtggccartgagcatctggaaattacagaactt

SEQ ID NO: 3460 - DNA, 51 bp, synthetic construct
  misc_feature 1..51: note = Synthetic polynucleotide
  source 1..51: mol_type = other DNA
tttggaatttatccagtgatcaggtrttgtgcaaagagctagtgaaccttt

SEQ ID NO: 3461 - DNA, 51 bp, synthetic construct
  misc_feature 1..51: note = Synthetic polynucleotide
  source 1..51: mol_type = other DNA
gggcaatttaggaaccttttttattrccaatgtgagaattgtgtggcatgc

SEQ ID NO: 3462 - DNA, 51 bp, synthetic construct
  misc_feature 1..51: note = Synthetic polynucleotide
  source 1..51: mol_type = other DNA
ccacagtacccgtactcagcacctcrgtgtcgagacttcgtaccttcagca

SEQ ID NO: 3463 - DNA, 51 bp, synthetic construct
  misc_feature 1..51: note = Synthetic polynucleotide
  source 1..51: mol_type = other DNA
ggcattccggcgccattacatgatcrcactggaagtccctgctcgagacag

SEQ ID NO: 3464 - DNA, 51 bp, synthetic construct
  misc_feature 1..51: note = Synthetic polynucleotide
  source 1..51: mol_type = other DNA
tgccttttcctccacggacaaatgcrgaccctggaccaagtaagtaacaac

SEQ ID NO: 3465 - DNA, 51 bp, synthetic construct
  misc_feature 1..51: note = Synthetic polynucleotide
  source 1..51: mol_type = other DNA
tgccacggggtgtcaggctcctgtgrggtaaagacgtgctggcgagccgtg

SEQ ID NO: 3466 - DNA, 51 bp, synthetic construct
  misc_feature 1..51: note = Synthetic polynucleotide
  source 1..51: mol_type = other DNA
gctggcactgccgggcaaggcagagrgtgtggcgtcgctcaccagccagtg

SEQ ID NO: 3467 - DNA, 51 bp, synthetic construct
  misc_feature 1..51: note = Synthetic polynucleotide
  source 1..51: mol_type = other DNA
tagggcacgaccaatcaaatacacargaaaaggcgttgtagttcctatctc

SEQ ID NO: 3468 - DNA, 51 bp, synthetic construct
  misc_feature 1..51: note = Synthetic polynucleotide
  source 1..51: mol_type = other DNA
ggaagctggcaaacagctgcccttcrtctatggggacattcctcccggcat

SEQ ID NO: 3469 - DNA, 51 bp, synthetic construct
  misc_feature 1..51: note = Synthetic polynucleotide
  source 1..51: mol_type = other DNA
gcaatgttgcctcccccaggacctcrgagctttgtccatttcacaaaacag

SEQ ID NO: 3470 - DNA, 51 bp, synthetic construct
  misc_feature 1..51: note = Synthetic polynucleotide
  source 1..51: mol_type = other DNA
gcctgtggataatgcacgagaagccrtgcagcaggcagatgactggctggg

SEQ ID NO: 3471 - DNA, 51 bp, synthetic construct
  misc_feature 1..51: note = Synthetic polynucleotide
  source 1..51: mol_type = other DNA
gtaggcatgggccagatctccaactrtgtggcagcatttgtcctgggtatg

SEQ ID NO: 3472 - DNA, 51 bp, synthetic construct
  misc_feature 1..51: note = Synthetic polynucleotide
  source 1..51: mol_type = other DNA
ccgcagtacaacccaggggacaaagrtaccaaaattgccaagaggatggct

SEQ ID NO: 3473 - DNA, 51 bp, synthetic construct
  misc_feature 1..51: note = Synthetic polynucleotide
  source 1..51: mol_type = other DNA
tctcttctctctgttggttgtaggargctgtacaacaatggctttacttca

SEQ ID NO: 3474 - DNA, 51 bp, synthetic construct
  misc_feature 1..51: note = Synthetic polynucleotide
  source 1..51: mol_type = other DNA
ggagacactggcaccctatatccccrtggacggggaagacttccagctaag

SEQ ID NO: 3475 - DNA, 51 bp, synthetic construct
  misc_feature 1..51: note = Synthetic polynucleotide
  source 1..51: mol_type = other DNA
gttcagcctcatcttcaagctcatcrttgagttcctcttcctctacctgct

SEQ ID NO: 3476 - DNA, 51 bp, synthetic construct
  misc_feature 1..51: note = Synthetic polynucleotide
  source 1..51: mol_type = other DNA
atgccgcgcctggtgcagtgtgccadcgtggccccctgccccaacatcgtg

SEQ ID NO: 3477 - DNA, 51 bp, synthetic construct
  misc_feature 1..51: note = Synthetic polynucleotide
  source 1..51: mol_type = other DNA
tgtttttttgcttttgtaggttgccrtgggtcaaggtcaagctgatttagc

SEQ ID NO: 3478 - DNA, 51 bp, synthetic construct
  misc_feature 1..51: note = Synthetic polynucleotide
  source 1..51: mol_type = other DNA
cgcatgccacctgatgtaattagagrtattcttgaaggagttttaaggttg

SEQ ID NO: 3479 - DNA, 51 bp, synthetic construct
  misc_feature 1..51: note = Synthetic polynucleotide
  source 1..51: mol_type = other DNA
gttgacccatctctgttcccttcacrggtaagggggcttacgtgtagaagc

SEQ ID NO: 3480 - DNA, 51 bp, synthetic construct
  misc_feature 1..51: note = Synthetic polynucleotide
  source 1..51: mol_type = other DNA
tggtccaagtggtgctggaaaatcarcgctttggagaatgttaagggctgc

SEQ ID NO: 3481 - DNA, 51 bp, synthetic construct
  misc_feature 1..51: note = Synthetic polynucleotide
  source 1..51: mol_type = other DNA
gtggcctttttgagactaaatcacarcaaactgtcagatgagggtctccca

SEQ ID NO: 3482 - DNA, 51 bp, synthetic construct
  misc_feature 1..51: note = Synthetic polynucleotide
  source 1..51: mol_type = other DNA
tatccgcgccatgcctgtctacaaaraagctgagcacgtcacggaggtggt

SEQ ID NO: 3483 - DNA, 51 bp, synthetic construct
  misc_feature 1..51: note = Synthetic polynucleotide
  source 1..51: mol_type = other DNA
cggatctgtgcttgcccaggaagagrcaggaaggcggatgaagatagcatc

SEQ ID NO: 3484 - DNA, 51 bp, synthetic construct
  misc_feature 1..51: note = Synthetic polynucleotide
  source 1..51: mol_type = other DNA
gatctgtgcttgcccaggaagagacrggaaggcggatgaagatagcatcag

SEQ ID NO: 3485 - DNA, 51 bp, synthetic construct
  misc_feature 1..51: note = Synthetic polynucleotide
  source 1..51: mol_type = other DNA
agaacagtggctgcttttggtggtgrgaaaagagaggttgaaaggttggtt

SEQ ID NO: 3486 - DNA, 51 bp, synthetic construct
  misc_feature 1..51: note = Synthetic polynucleotide
  source 1..51: mol_type = other DNA
ggacctcacgtacccagtcacctccrtgttcactgggtctgcctttaaccg

SEQ ID NO: 3487 - DNA, 51 bp, synthetic construct
  misc_feature 1..51: note = Synthetic polynucleotide
  source 1..51: mol_type = other DNA
gtacaccacggggacgatgggcaccygcaggcagggagacgcacagctgag

SEQ ID NO: 3488 - DNA, 51 bp, synthetic construct
  misc_feature 1..51: note = Synthetic polynucleotide
  source 1..51: mol_type = other DNA
aagtctcggatctttcagaacctcarcggggctttaggtgaggaggaagac

SEQ ID NO: 3489 - DNA, 51 bp, synthetic construct
  misc_feature 1..51: note = Synthetic polynucleotide
  source 1..51: mol_type = other DNA
gcatacttagactactacctcgatgrtattattgacttatttaattgtttg

SEQ ID NO: 3490 - DNA, 51 bp, synthetic construct
  misc_feature 1..51: note = Synthetic polynucleotide
  source 1..51: mol_type = other DNA
gggccaggtgcaggagacatcaaggrtcctggatgaggtgagctgggcgtg

SEQ ID NO: 3491 - DNA, 51 bp, synthetic construct
  misc_feature 1..51: note = Synthetic polynucleotide
  source 1..51: mol_type = other DNA
cttttttgtcttctctctggggcagrggctggcaggatcccaaacccacac

SEQ ID NO: 3492 - DNA, 51 bp, synthetic construct
  misc_feature 1..51: note = Synthetic polynucleotide
  source 1..51: mol_type = other DNA
cagctcttaaccactccagccactcrctctggcacctctgttttttccctt

SEQ ID NO: 3493 - DNA, 51 bp, synthetic construct
  misc_feature 1..51: note = Synthetic polynucleotide
  source 1..51: mol_type = other DNA
aacttgtcccctccctgtgtcttctrgctgtgcagcaagatcttggagaag

SEQ ID NO: 3494 - DNA, 51 bp, synthetic construct
  misc_feature 1..51: note = Synthetic polynucleotide
  source 1..51: mol_type = other DNA
cgctgcggctggattcccatccagtrccccatcatttccgagtgcaagtgc

SEQ ID NO: 3495 - DNA, 51 bp, synthetic construct
  misc_feature 1..51: note = Synthetic polynucleotide
  source 1..51: mol_type = other DNA
gatacaatttttttctttctcttttrggccttgaatgtcccatgcagttcc

SEQ ID NO: 3496 - DNA, 51 bp, synthetic construct
  misc_feature 1..51: note = Synthetic polynucleotide
  source 1..51: mol_type = other DNA
aggggattatatgggagtccaccccrtgggtctcttctggtctctgaaacc

SEQ ID NO: 3497 - DNA, 51 bp, synthetic construct
  misc_feature 1..51: note = Synthetic polynucleotide
  source 1..51: mol_type = other DNA
tttggctttcctgtgcactacacagrcgtgtccaacatgggccgtggtgcc

SEQ ID NO: 3498 - DNA, 51 bp, synthetic construct
  misc_feature 1..51: note = Synthetic polynucleotide
  source 1..51: mol_type = other DNA
gctgcttctgtcttgcaggccatctrcgtgattgacttcttctggaacgaa

SEQ ID NO: 3499 - DNA, 51 bp, synthetic construct
  misc_feature 1..51: note = Synthetic polynucleotide
  source 1..51: mol_type = other DNA
aaggttctctttcttgcagggcccartggctgcaaaatcgcaacccaacat

SEQ ID NO: 3500 - DNA, 51 bp, synthetic construct
  misc_feature 1..51: note = Synthetic polynucleotide
  source 1..51: mol_type = other DNA
tatcatcagagcatgtcacagatctrtggactcattcatggtgacctgtaa

SEQ ID NO: 3501 - DNA, 51 bp, synthetic construct
  misc_feature 1..51: note = Synthetic polynucleotide
  source 1..51: mol_type = other DNA
gtgctggacgaggcaaagaatatcarcaagtcactgtcagctctgggcaat

SEQ ID NO: 3502 - DNA, 51 bp, synthetic construct
  misc_feature 1..51: note = Synthetic polynucleotide
  source 1..51: mol_type = other DNA
gtctccttcctcccccagaaaagctrtgttccatatcgtgacagcaaaatg

SEQ ID NO: 3503 - DNA, 51 bp, synthetic construct
  misc_feature 1..51: note = Synthetic polynucleotide
  source 1..51: mol_type = other DNA
ttttgtccaggcttgagtcaccatgrgtagtagtttaggaaaagaaaaaga

SEQ ID NO: 3504 - DNA, 51 bp, synthetic construct
  misc_feature 1..51: note = Synthetic polynucleotide
  source 1..51: mol_type = other DNA
tactccttgatcaaaaataaaatccrcagattgcccgttattgaccctatc

SEQ ID NO: 3505 - DNA, 51 bp, synthetic construct
  misc_feature 1..51: note = Synthetic polynucleotide
  source 1..51: mol_type = other DNA
gtcctgcttttctctttgcaggtccrtcggctggtggtggtaaatgaagca

SEQ ID NO: 3506 - DNA, 51 bp, synthetic construct
  misc_feature 1..51: note = Synthetic polynucleotide
  source 1..51: mol_type = other DNA
ttaaaatttgtatacgtgtaatgcarcattcagaggattgctgcatttaga

SEQ ID NO: 3507 - DNA, 51 bp, synthetic construct
  misc_feature 1..51: note = Synthetic polynucleotide
  source 1..51: mol_type = other DNA
ggccttggacaagttgttactgactrtgttcatggggatgccttgcagaaa

SEQ ID NO: 3508 - DNA, 51 bp, synthetic construct
  misc_feature 1..51: note = Synthetic polynucleotide
  source 1..51: mol_type = other DNA
gaatggtgtggagtgcagcacatacrcttgtcaccgagccaccattgtatg

SEQ ID NO: 3509 - DNA, 51 bp, synthetic construct
  misc_feature 1..51: note = Synthetic polynucleotide
  source 1..51: mol_type = other DNA
atgaccttgagccctcaggaacgagdtggcggttctctggaggctgagtgc

SEQ ID NO: 3510 - DNA, 51 bp, synthetic construct
  misc_feature 1..51: note = Synthetic polynucleotide
  source 1..51: mol_type = other DNA
tcagtaaaatattctggctttacaaytggacgtccacaaatgagtgcacat

SEQ ID NO: 3511 - DNA, 51 bp, synthetic construct
  misc_feature 1..51: note = Synthetic polynucleotide
  source 1..51: mol_type = other DNA
ttcctgtacagctgggccaaacccarccctagggaggccactgtctcctaa

SEQ ID NO: 3512 - DNA, 51 bp, synthetic construct
  misc_feature 1..51: note = Synthetic polynucleotide
  source 1..51: mol_type = other DNA
cttatacttttcctagaagaggatcrctacttagccccagacttttaccat

SEQ ID NO: 3513 - DNA, 51 bp, synthetic construct
  misc_feature 1..51: note = Synthetic polynucleotide
  source 1..51: mol_type = other DNA
gaaaacttggaaatccacagagcacratatgggtctagccttgacccggaa

SEQ ID NO: 3514 - DNA, 51 bp, synthetic construct
  misc_feature 1..51: note = Synthetic polynucleotide
  source 1..51: mol_type = other DNA
cagtccaatggcacgcatatcatgtrtaaaaacacactctggatcgaaagc

SEQ ID NO: 3515 - DNA, 51 bp, synthetic construct
  misc_feature 1..51: note = Synthetic polynucleotide
  source 1..51: mol_type = other DNA
ggtattgtctttgcatgtatttcctrgggatgtcctttaactccattgcct

SEQ ID NO: 3516 - DNA, 51 bp, synthetic construct
  misc_feature 1..51: note = Synthetic polynucleotide
  source 1..51: mol_type = other DNA
gagatttttctttccaaagcaattcrcaagtccttcctagaggttaatgaa

SEQ ID NO: 3517 - DNA, 51 bp, synthetic construct
  misc_feature 1..51: note = Synthetic polynucleotide
  source 1..51: mol_type = other DNA
agacggttttcggaaggtggtgagcrtcgagcagggcggcctgcttaggcc

SEQ ID NO: 3518 - DNA, 51 bp, synthetic construct
  misc_feature 1..51: note = Synthetic polynucleotide
  source 1..51: mol_type = other DNA
gtttactgttctgattttcatgctgraagagcagcgagagagaaaattcat

SEQ ID NO: 3519 - DNA, 51 bp, synthetic construct
  misc_feature 1..51: note = Synthetic polynucleotide
  source 1..51: mol_type = other DNA
gtgattatcaccagcaccagttcgtrttatgtgttttacatttacgtggga

SEQ ID NO: 3520 - DNA, 51 bp, synthetic construct
  misc_feature 1..51: note = Synthetic polynucleotide
  source 1..51: mol_type = other DNA
ctcaataagtcctggccagagggtgrgatttgaacactgcttgctttgtta

SEQ ID NO: 3521 - DNA, 51 bp, synthetic construct
  misc_feature 1..51: note = Synthetic polynucleotide
  source 1..51: mol_type = other DNA
actgagtggaggtcaacgagcaagartttctttagcaaggtgaataactaa

SEQ ID NO: 3522 - DNA, 51 bp, synthetic construct
  misc_feature 1..51: note = Synthetic polynucleotide
  source 1..51: mol_type = other DNA
ttactgggaagaatcatagcttcctrtgacccggataacaaggaggaacgc

SEQ ID NO: 3523 - DNA, 51 bp, synthetic construct
  misc_feature 1..51: note = Synthetic polynucleotide
  source 1..51: mol_type = other DNA
tggaatctttttatatttaggggtarggatctcatttgtacattcattatg

SEQ ID NO: 3524 - DNA, 51 bp, synthetic construct
  misc_feature 1..51: note = Synthetic polynucleotide
  source 1..51: mol_type = other DNA
ctgttccacaaagctctgaatttacrtactgccaactggttcttgtacctg

SEQ ID NO: 3525 - DNA, 51 bp, synthetic construct
  misc_feature 1..51: note = Synthetic polynucleotide
  misc_difference 26: note = n is a, c, g, t or u
  source 1..51: mol_type = other DNA
catattagagaacatttccttctcantaagtcctggccagagggtgagatt

SEQ ID NO: 3526 - DNA, 51 bp, synthetic construct
  misc_feature 1..51: note = Synthetic polynucleotide
  source 1..51: mol_type = other DNA
gcactcctcatggggctaatctgggrgttgttacaggcgtctgccttctgt

SEQ ID NO: 3527 - DNA, 51 bp, synthetic construct
  misc_feature 1..51: note = Synthetic polynucleotide
  source 1..51: mol_type = other DNA
cctccaccctcaggagaaagagaagragtacatgctgcctctggacaacct

SEQ ID NO: 3528 - DNA, 51 bp, synthetic construct
  misc_feature 1..51: note = Synthetic polynucleotide
  source 1..51: mol_type = other DNA
tctcagaccccaatcctaagccctcrggaggttgtgtcttgtagccagtat

SEQ ID NO: 3529 - DNA, 51 bp, synthetic construct
  misc_feature 1..51: note = Synthetic polynucleotide
  source 1..51: mol_type = other DNA
aatcatgctgttctgcttgtgggctrtggcactgactcagcctctgggatg

SEQ ID NO: 3530 - DNA, 51 bp, synthetic construct
  misc_feature 1..51: note = Synthetic polynucleotide
  source 1..51: mol_type = other DNA
cgttattactcctctgagtaccactrtgtaggaggtttctatggaggctgc

SEQ ID NO: 3531 - DNA, 51 bp, synthetic construct
  misc_feature 1..51: note = Synthetic polynucleotide
  source 1..51: mol_type = other DNA
tccgacccctccaacctgcggccctrgagcgcccccgccgccccgggggaa

SEQ ID NO: 3532 - DNA, 51 bp, synthetic construct
  misc_feature 1..51: note = Synthetic polynucleotide
  source 1..51: mol_type = other DNA
accaccattggctacggggacaagtrcccccagacctggaacggcaggctc

SEQ ID NO: 3533 - DNA, 51 bp, synthetic construct
  misc_feature 1..51: note = Synthetic polynucleotide
  source 1..51: mol_type = other DNA
gccctgagctggggcctccgtgaagdctactcccggggcggctactgcatg

SEQ ID NO: 3534 - DNA, 51 bp, synthetic construct
  misc_feature 1..51: note = Synthetic polynucleotide
  source 1..51: mol_type = other DNA
agaacgttattatccagagtataccyaaaggagaaaaagaatcccaaaata

SEQ ID NO: 3535 - DNA, 51 bp, synthetic construct
  misc_feature 1..51: note = Synthetic polynucleotide
  source 1..51: mol_type = other DNA
ggagaaggagcagatcaagtccctcvacagcaggttcgcggccttcatcga

SEQ ID NO: 3536 - DNA, 51 bp, synthetic construct
  misc_feature 1..51: note = Synthetic polynucleotide
  source 1..51: mol_type = other DNA
tctaatggcgaaaaaaaatttcaacrcaaatctgctggaatagatagaaaa

SEQ ID NO: 3537 - DNA, 51 bp, synthetic construct
  misc_feature 1..51: note = Synthetic polynucleotide
  source 1..51: mol_type = other DNA
tttgatgtctttcctgatggatgggrcaagagatactgtctgcgacatgtg

SEQ ID NO: 3538 - DNA, 51 bp, synthetic construct
  misc_feature 1..51: note = Synthetic polynucleotide
  source 1..51: mol_type = other DNA
tcttttgctttctaaacacttttcartgtttttaggtgtatagtgttgatt

SEQ ID NO: 3539 - DNA, 51 bp, synthetic construct
  misc_feature 1..51: note = Synthetic polynucleotide
  source 1..51: mol_type = other DNA
ctcatcgtagccaccattgctgtcargtacactcagtctaactctgtgtgc

SEQ ID NO: 3540 - DNA, 51 bp, synthetic construct
  misc_feature 1..51: note = Synthetic polynucleotide
  source 1..51: mol_type = other DNA
gatgacaatcatgttgcagcaattcrctgtaaagctggaaagggacgaact

SEQ ID NO: 3541 - DNA, 51 bp, synthetic construct
  misc_feature 1..51: note = Synthetic polynucleotide
  source 1..51: mol_type = other DNA
gttgcacaatatccttttgaagaccrtaacccaccacagctagaacttatc

SEQ ID NO: 3542 - DNA, 51 bp, synthetic construct
  misc_feature 1..51: note = Synthetic polynucleotide
  source 1..51: mol_type = other DNA
cctcagccgttacctgtgtgtggtgrtatcaaagtagagttcttccacaaa

SEQ ID NO: 3543 - DNA, 51 bp, synthetic construct
  misc_feature 1..51: note = Synthetic polynucleotide
  source 1..51: mol_type = other DNA
tccttgtcccgagaatcttccttacrgtaccattcaggaatggggactgtg

SEQ ID NO: 3544 - DNA, 51 bp, synthetic construct
  misc_feature 1..51: note = Synthetic polynucleotide
  source 1..51: mol_type = other DNA
agaaactatgcaaaatcttaatgatrgattagcttcctacctggataaggt

SEQ ID NO: 3545 - DNA, 51 bp, synthetic construct
  misc_feature 1..51: note = Synthetic polynucleotide
  source 1..51: mol_type = other DNA
tgagagaataattcaaaggtttggargaaaagtggtgtatgttgttatagg

SEQ ID NO: 3546 - DNA, 51 bp, synthetic construct
  misc_feature 1..51: note = Synthetic polynucleotide
  source 1..51: mol_type = other DNA
gtgtactcggggagcctctatttccrgggcgctgagtccagaactgtcata

SEQ ID NO: 3547 - DNA, 51 bp, synthetic construct
  misc_feature 1..51: note = Synthetic polynucleotide
  source 1..51: mol_type = other DNA
acaaacctgggagacaaacatccgtragcagtcagtcgccaatgccttcat

SEQ ID NO: 3548 - DNA, 51 bp, synthetic construct
  misc_feature 1..51: note = Synthetic polynucleotide
  source 1..51: mol_type = other DNA
gaccctcaagctggcggccaggtacrtcgacttcctctaccaggtcctcca

SEQ ID NO: 3549 - DNA, 51 bp, synthetic construct
  misc_feature 1..51: note = Synthetic polynucleotide
  source 1..51: mol_type = other DNA
acagatcaccgtcctgctgggccacracggtgccgggaagaccaccaccct

SEQ ID NO: 3550 - DNA, 51 bp, synthetic construct
  misc_feature 1..51: note = Synthetic polynucleotide
  source 1..51: mol_type = other DNA
attcctcagaggccatgtggccccarctggcagcgacagctgcagacgggc

SEQ ID NO: 3551 - DNA, 51 bp, synthetic construct
  misc_feature 1..51: note = Synthetic polynucleotide
  source 1..51: mol_type = other DNA
aacgaacccacgtactgtctgtgcarccaggtctcctatggggagatgatc

SEQ ID NO: 3552 - DNA, 51 bp, synthetic construct
  misc_feature 1..51: note = Synthetic polynucleotide
  source 1..51: mol_type = other DNA
gattttgaacgaactcttaaaggacrtacagactctgtacaggacatttca

SEQ ID NO: 3553 - DNA, 51 bp, synthetic construct
  misc_feature 1..51: note = Synthetic polynucleotide
  source 1..51: mol_type = other DNA
tacggggagagtggagaaaaaggggrcacagggttaatgtgaagtccagga

SEQ ID NO: 3554 - DNA, 51 bp, synthetic construct
  misc_feature 1..51: note = Synthetic polynucleotide
  source 1..51: mol_type = other DNA
actttacgacctacacaggagtttcrgtaacgtgaagtatgtcatgttgga

SEQ ID NO: 3555 - DNA, 51 bp, synthetic construct
  misc_feature 1..51: note = Synthetic polynucleotide
  source 1..51: mol_type = other DNA
tctgctgctgcaataagataaaaaayccactaacacaactagcccggatta

SEQ ID NO: 3556 - DNA, 51 bp, synthetic construct
  misc_feature 1..51: note = Synthetic polynucleotide
  source 1..51: mol_type = other DNA
atctgggacggcgaggagaccagctrctgcttcaaggagaagtcgaggggt

SEQ ID NO: 3557 - DNA, 51 bp, synthetic construct
  misc_feature 1..51: note = Synthetic polynucleotide
  source 1..51: mol_type = other DNA
agaagacgcacacataacttttgctrtattggatgcagtaaatggaaatat

SEQ ID NO: 3558 - DNA, 51 bp, synthetic construct
  misc_feature 1..51: note = Synthetic polynucleotide
  source 1..51: mol_type = other DNA
ccgcccagctgctgcgtgcccaccarattgactcccatcagcattctatac

SEQ ID NO: 3559 - DNA, 51 bp, synthetic construct
  misc_feature 1..51: note = Synthetic polynucleotide
  source 1..51: mol_type = other DNA
accccccatcacaccccacgagtacvtgctctcgctgtacaggacgctgtc

SEQ ID NO: 3560 - DNA, 51 bp, synthetic construct
  misc_feature 1..51: note = Synthetic polynucleotide
  source 1..51: mol_type = other DNA
cgagagaagctgaccatcatcccccrggtgagctctagaacttactcgggc

SEQ ID NO: 3561 - DNA, 51 bp, synthetic construct
  misc_feature 1..51: note = Synthetic polynucleotide
  source 1..51: mol_type = other DNA
acctggccagcttccccaagatgtgrctccagccagccaaatccatcctgc

SEQ ID NO: 3562 - DNA, 51 bp, synthetic construct
  misc_feature 1..51: note = Synthetic polynucleotide
  source 1..51: mol_type = other DNA
aacgtcttcaacatcctcatcgtctrcatgctattcatgttcatcttcgcc

SEQ ID NO: 3563 - DNA, 51 bp, synthetic construct
  misc_feature 1..51: note = Synthetic polynucleotide
  source 1..51: mol_type = other DNA
caagagaaggaaagaaacatatttgrccagcgtgccatagagaatgagcta

SEQ ID NO: 3564 - DNA, 51 bp, synthetic construct
  misc_feature 1..51: note = Synthetic polynucleotide
  source 1..51: mol_type = other DNA
acgctcaaccgcttagcaggcaaacrgatgatccaagtcgtgaagtgggca

SEQ ID NO: 3565 - DNA, 51 bp, synthetic construct
  misc_feature 1..51: note = Synthetic polynucleotide
  source 1..51: mol_type = other DNA
atcagcgaccagctgcccaaggtggrgtcggggaacgccaagccgctctac

SEQ ID NO: 3566 - DNA, 51 bp, synthetic construct
  misc_feature 1..51: note = Synthetic polynucleotide
  source 1..51: mol_type = other DNA
ccaggtagaggtatcacacccaactrtgaagatcagcatcctgctcatgtt

SEQ ID NO: 3567 - DNA, 51 bp, synthetic construct
  misc_feature 1..51: note = Synthetic polynucleotide
  source 1..51: mol_type = other DNA
caaggcaaagaggaaagaaattatcrtatcttttataggttgtgtgctggt

SEQ ID NO: 3568 - DNA, 51 bp, synthetic construct
  misc_feature 1..51: note = Synthetic polynucleotide
  source 1..51: mol_type = other DNA
cgccagcaacaagtacggcctggccrcagagggcacacggcatacgctgac

SEQ ID NO: 3569 - DNA, 51 bp, synthetic construct
  misc_feature 1..51: note = Synthetic polynucleotide
  source 1..51: mol_type = other DNA
tggagtatgaacttcaatacaaagargtaaatgaaactaaatggaaaatgg

SEQ ID NO: 3570 - DNA, 51 bp, synthetic construct
  misc_feature 1..51: note = Synthetic polynucleotide
  source 1..51: mol_type = other DNA
atcatgcttggctgcatcttcatgargactgcccaagcccaccgcagggct

SEQ ID NO: 3571 - DNA, 51 bp, synthetic construct
  misc_feature 1..51: note = Synthetic polynucleotide
  source 1..51: mol_type = other DNA
ctggtggccccgctgatcatctaccrtgtcattgatgccaacagcccactc

SEQ ID NO: 3572 - DNA, 51 bp, synthetic construct
  misc_feature 1..51: note = Synthetic polynucleotide
  source 1..51: mol_type = other DNA
gaaaaaaactgcaaattaaatgagayacctttgaattgggagagttaattc

SEQ ID NO: 3573 - DNA, 51 bp, synthetic construct
  misc_feature 1..51: note = Synthetic polynucleotide
  source 1..51: mol_type = other DNA
ggcaaggcattcagccagagctccarcctcatcacccacagccgcaaacac

SEQ ID NO: 3574 - DNA, 51 bp, synthetic construct
  misc_feature 1..51: note = Synthetic polynucleotide
  source 1..51: mol_type = other DNA
cccttcggctgcgacctctgtgggargggtttccagaggaaggtggacctc

SEQ ID NO: 3575 - DNA, 51 bp, synthetic construct
  misc_feature 1..51: note = Synthetic polynucleotide
  source 1..51: mol_type = other DNA
tgccatcaagcttgaatgtgtcaaarccaaacaccctcagctccacattga

SEQ ID NO: 3576 - DNA, 51 bp, synthetic construct
  misc_feature 1..51: note = Synthetic polynucleotide
  source 1..51: mol_type = other DNA
aaacagaaaggacattgctcaggaartgctcatgaaccaaaccaaagccac

SEQ ID NO: 3577 - DNA, 51 bp, synthetic construct
  misc_feature 1..51: note = Synthetic polynucleotide
  source 1..51: mol_type = other DNA
tgaaacaacccatccttatttcaacrgaaagaggacttgccagacccacgc

SEQ ID NO: 3578 - DNA, 51 bp, synthetic construct
  misc_feature 1..51: note = Synthetic polynucleotide
  source 1..51: mol_type = other DNA
tgctatgggcgcagatatggccccaragggatcgggtatggacaaggcgct

SEQ ID NO: 3579 - DNA, 51 bp, synthetic construct
  misc_feature 1..51: note = Synthetic polynucleotide
  source 1..51: mol_type = other DNA
gtgaactatcaagatggcaacctcarcatttcaattccagtgtttagtatt

SEQ ID NO: 3580 - DNA, 51 bp, synthetic construct
  misc_feature 1..51: note = Synthetic polynucleotide
  source 1..51: mol_type = other DNA
ttggaatctcagaatgcacaaaaagraagtgacgcatgtggccctgaaccc

SEQ ID NO: 3581 - DNA, 51 bp, synthetic construct
  misc_feature 1..51: note = Synthetic polynucleotide
  source 1..51: mol_type = other DNA
aaggagacaatcgaagactgttgggrccaggatgcagaggctcggcttact

SEQ ID NO: 3582 - DNA, 51 bp, synthetic construct
  misc_feature 1..51: note = Synthetic polynucleotide
  source 1..51: mol_type = other DNA
acagagaaggcacttccttcggccarccctggaactgaattcggtgagttt

SEQ ID NO: 3583 - DNA, 51 bp, synthetic construct
  misc_feature 1..51: note = Synthetic polynucleotide
  source 1..51: mol_type = other DNA
ctacctcatcatgatcagtgcgctcrtggccctagtgttcatcaagtacct

SEQ ID NO: 3584 - DNA, 51 bp, synthetic construct
  misc_feature 1..51: note = Synthetic polynucleotide
  source 1..51: mol_type = other DNA
ccagacatcatcttcaaggacgaggrgaacacaggcgccgaccgcctcatg

SEQ ID NO: 3585 - DNA, 51 bp, synthetic construct
  misc_feature 1..51: note = Synthetic polynucleotide
  source 1..51: mol_type = other DNA
acttctctctggcttcttttttaggrcgtggagaacagcttcttcttgaat

SEQ ID NO: 3586 - DNA, 51 bp, synthetic construct
  misc_feature 1..51: note = Synthetic polynucleotide
  source 1..51: mol_type = other DNA
gcgaccaatcgggcccaagccaaccraggcagggaaagataagtctaaagc

SEQ ID NO: 3587 - DNA, 51 bp, synthetic construct
  misc_feature 1..51: note = Synthetic polynucleotide
  source 1..51: mol_type = other DNA
tctccccctccaccaggtggtggtartcttggaatgaacagtaggaaacca

SEQ ID NO: 3588 - DNA, 51 bp, synthetic construct
  misc_feature 1..51: note = Synthetic polynucleotide
  source 1..51: mol_type = other DNA
tacctggtcaatgcgtatcccctggrtatgtcccagtattttcggcttttc

SEQ ID NO: 3589 - DNA, 51 bp, synthetic construct
  misc_feature 1..51: note = Synthetic polynucleotide
  source 1..51: mol_type = other DNA
tttttaggaccctggtttgatatgtrcctatctgctcgagactccgttgtt

SEQ ID NO: 3590 - DNA, 51 bp, synthetic construct
  misc_feature 1..51: note = Synthetic polynucleotide
  source 1..51: mol_type = other DNA
tcgccgggcccatgaagcgggagachgtaagcgacaaacgcacagcgtcgg

SEQ ID NO: 3591 - DNA, 51 bp, synthetic construct
  misc_feature 1..51: note = Synthetic polynucleotide
  source 1..51: mol_type = other DNA
aacttcgtgaacttcggcgtcggggrcttgaatgcggttcagagccccggg

SEQ ID NO: 3592 - DNA, 51 bp, synthetic construct
  misc_feature 1..51: note = Synthetic polynucleotide
  source 1..51: mol_type = other DNA
gctgaaactcacgtccacgcaggtcragatctggttccagaaccggcgcta

SEQ ID NO: 3593 - DNA, 51 bp, synthetic construct
  misc_feature 1..51: note = Synthetic polynucleotide
  source 1..51: mol_type = other DNA
gtgcgccgcgcccaggacttcgtgtrccacctgcactgctttgcctgcgtc

SEQ ID NO: 3594 - DNA, 51 bp, synthetic construct
  misc_feature 1..51: note = Synthetic polynucleotide
  source 1..51: mol_type = other DNA
cttgtactttttttcccctttaactrggaattgtggtgcttggaataaaca

SEQ ID NO: 3595 - DNA, 51 bp, synthetic construct
  misc_feature 1..51: note = Synthetic polynucleotide
  source 1..51: mol_type = other DNA
acatatttaatattttgtttttcttrgaccattccaacaaaagacagactt

SEQ ID NO: 3596 - DNA, 51 bp, synthetic construct
  misc_feature 1..51: note = Synthetic polynucleotide
  source 1..51: mol_type = other DNA
atgtgtgtttcacgtaggtggtttgrcaagtcgttcacgtttgttgtcttc

SEQ ID NO: 3597 - DNA, 51 bp, synthetic construct
  misc_feature 1..51: note = Synthetic polynucleotide
  source 1..51: mol_type = other DNA
cggctgctgaagccccgggagatggrgcagcagatgcagaggatcctggac

SEQ ID NO: 3598 - DNA, 51 bp, synthetic construct
  misc_feature 1..51: note = Synthetic polynucleotide
  source 1..51: mol_type = other DNA
tccattgacagcctccagctgggctrtgcggaggatgggcactgcaaaggc

SEQ ID NO: 3599 - DNA, 51 bp, synthetic construct
  misc_feature 1..51: note = Synthetic polynucleotide
  source 1..51: mol_type = other DNA
caccctgcgctcacgcctctccatcrtcctgcaggaccccgtcctcttcag

SEQ ID NO: 3600 - DNA, 51 bp, synthetic construct
  misc_feature 1..51: note = Synthetic polynucleotide
  source 1..51: mol_type = other DNA
acatggcttcatttccctgggcacarcctgcggtggatcctgaccttcatg

SEQ ID NO: 3601 - DNA, 51 bp, synthetic construct
  misc_feature 1..51: note = Synthetic polynucleotide
  source 1..51: mol_type = other DNA
tctcagaaagaacttgccatcatccrtggacctcctggcactgggaaaacc

SEQ ID NO: 3602 - DNA, 51 bp, synthetic construct
  misc_feature 1..51: note = Synthetic polynucleotide
  source 1..51: mol_type = other DNA
gaagcacgtgcaggtcctggccaacragcgcatcaacgccatggcagagga

SEQ ID NO: 3603 - DNA, 51 bp, synthetic construct
  misc_feature 1..51: note = Synthetic polynucleotide
  source 1..51: mol_type = other DNA
tcccgggacgtgtacagcactgactrctacagggtgagtagctgtgcagat

SEQ ID NO: 3604 - DNA, 51 bp, synthetic construct
  misc_feature 1..51: note = Synthetic polynucleotide
  source 1..51: mol_type = other DNA
tcagaagcatttttctccctctttcrggctgttatcaaagaacagcttcaa

SEQ ID NO: 3605 - DNA, 51 bp, synthetic construct
  misc_feature 1..51: note = Synthetic polynucleotide
  source 1..51: mol_type = other DNA
aagctccgctggtacttcaagctctrtgatgtagatggcaacggctgcatt

SEQ ID NO: 3606 - DNA, 51 bp, synthetic construct
  misc_feature 1..51: note = Synthetic polynucleotide
  source 1..51: mol_type = other DNA
ttaatttcatggtacatgagtggctrtcatactggctattatatggtaagt

SEQ ID NO: 3607 - DNA, 51 bp, synthetic construct
  misc_feature 1..51: note = Synthetic polynucleotide
  source 1..51: mol_type = other DNA
tcttgatgatgctgatgctttgggargtatgttaatttcatggtacatgag

SEQ ID NO: 3608 - DNA, 51 bp, synthetic construct
  misc_feature 1..51: note = Synthetic polynucleotide
  source 1..51: mol_type = other DNA
cgggacaactgtcccacggtgcctarcagtgcccaggaggactcagaccac

SEQ ID NO: 3609 - DNA, 51 bp, synthetic construct
  misc_feature 1..51: note = Synthetic polynucleotide
  source 1..51: mol_type = other DNA
ggtgatgcctgcgacgacgacgacgrcaatgacggagtccctgacagtcgg

SEQ ID NO: 3610 - DNA, 51 bp, synthetic construct
  misc_feature 1..51: note = Synthetic polynucleotide
  source 1..51: mol_type = other DNA
gatattgtagaccgagcaaaaatggragataccctgaagaggaggtttttc

SEQ ID NO: 3611 - DNA, 51 bp, synthetic construct
  misc_feature 1..51: note = Synthetic polynucleotide
  source 1..51: mol_type = other DNA
ggcatagataccaccaatgcctgctrcggtggtactgcctccctcttcaat

SEQ ID NO: 3612 - DNA, 51 bp, synthetic construct
  misc_feature 1..51: note = Synthetic polynucleotide
  source 1..51: mol_type = other DNA
cgaggtgtacagaaaatgaacagcaraactgtgaccagcacaatgttgggt

SEQ ID NO: 3613 - DNA, 51 bp, synthetic construct
  misc_feature 1..51: note = Synthetic polynucleotide
  source 1..51: mol_type = other DNA
atctgcaggcaagagtttcaccttgrccataaccgtcttcacaaatcctcc

SEQ ID NO: 3614 - DNA, 51 bp, synthetic construct
  misc_feature 1..51: note = Synthetic polynucleotide
  source 1..51: mol_type = other DNA
agagcgtgagcagatcaaaactctcdacaacaaatttgcctccttcattga

SEQ ID NO: 3615 - DNA, 51 bp, synthetic construct
  misc_feature 1..51: note = Synthetic polynucleotide
  source 1..51: mol_type = other DNA
gatgccagcacccaagtcctgctgtrcaggattcggtaggaagtgcccccc

SEQ ID NO: 3616 - DNA, 51 bp, synthetic construct
  misc_feature 1..51: note = Synthetic polynucleotide
  source 1..51: mol_type = other DNA
ctctgtccacttgaggtggtggtcartgccctggtgggcgccatcccgtcc

SEQ ID NO: 3617 - DNA, 51 bp, synthetic construct
  misc_feature 1..51: note = Synthetic polynucleotide
  source 1..51: mol_type = other DNA
agtgaggacgacttcgatatgttctrtgagatctgggagaaatttgaccca

SEQ ID NO: 3618 - DNA, 51 bp, synthetic construct
  misc_feature 1..51: note = Synthetic polynucleotide
  source 1..51: mol_type = other DNA
aaggactttctgcacaaggaccgggrtgacgtcaatgtggagatcgttttt

SEQ ID NO: 3619 - DNA, 51 bp, synthetic construct
  misc_feature 1..51: note = Synthetic polynucleotide
  source 1..51: mol_type = other DNA
tataatcgcaagacatcccgagtctrtaagttttgcagtaagcttgcagag

SEQ ID NO: 3620 - DNA, 51 bp, synthetic construct
  misc_feature 1..51: note = Synthetic polynucleotide
  source 1..51: mol_type = other DNA
ggccccctgctgccataccaagccgrgttcctggtgcgcagccacgatgcg

SEQ ID NO: 3621 - DNA, 51 bp, synthetic construct
  misc_feature 1..51: note = Synthetic polynucleotide
  source 1..51: mol_type = other DNA
ggagaaaaagaagaaaatgttaaaargaacagatacaaggacatactgcca

SEQ ID NO: 3622 - DNA, 51 bp, synthetic construct
  misc_feature 1..51: note = Synthetic polynucleotide
  source 1..51: mol_type = other DNA
ggggagctgtctgaggactccagcartgtggtccaactcattaagaatgct

SEQ ID NO: 3623 - DNA, 51 bp, synthetic construct
  misc_feature 1..51: note = Synthetic polynucleotide
  source 1..51: mol_type = other DNA
gtctgggggggcttcgcctacttgcrggatgtggtggagcaggcaatcatc

SEQ ID NO: 3624 - DNA, 51 bp, synthetic construct
  misc_feature 1..51: note = Synthetic polynucleotide
  source 1..51: mol_type = other DNA
cagatcacctccttcctgggccacartggagcggggaagacgaccaccatg

SEQ ID NO: 3625 - DNA, 51 bp, synthetic construct
  misc_feature 1..51: note = Synthetic polynucleotide
  source 1..51: mol_type = other DNA
ctcggagctggtaaaaagaggcctarcccctgtctttagatttacagtcca

SEQ ID NO: 3626 - DNA, 51 bp, synthetic construct
  misc_feature 1..51: note = Synthetic polynucleotide
  source 1..51: mol_type = other DNA
aagaacccgtatacataaaatctagvcaaaaaaggaaggaatcgaaccccc

SEQ ID NO: 3627 - DNA, 51 bp, synthetic construct
  misc_feature 1..51: note = Synthetic polynucleotide
  source 1..51: mol_type = other DNA
accttttaagttaaagattaagagarccaacacctctttacagtgaaatgc

SEQ ID NO: 3628 - DNA, 51 bp, synthetic construct
  misc_feature 1..51: note = Synthetic polynucleotide
  source 1..51: mol_type = other DNA
accccctctaccccctctagagcccrctgtaaagctaacttagcattaacc

SEQ ID NO: 3629 - DNA, 51 bp, synthetic construct
  misc_feature 1..51: note = Synthetic polynucleotide
  source 1..51: mol_type = other DNA
tcttaggccccaaaaattttggtgcractccaaataaaagtaataaccatg

SEQ ID NO: 3630 - DNA, 51 bp, synthetic construct
  misc_feature 1..51: note = Synthetic polynucleotide
  source 1..51: mol_type = other DNA
agaacagggtttgttaagatggcagrgcccggtaatcgcataaaacttaaa

SEQ ID NO: 3631 - DNA, 51 bp, synthetic construct
  misc_feature 1..51: note = Synthetic polynucleotide
  source 1..51: mol_type = other DNA
tttgttaagatggcagagcccggtartcgcataaaacttaaaactttacag

SEQ ID NO: 3632 - DNA, 51 bp, synthetic construct
  misc_feature 1..51: note = Synthetic polynucleotide
  source 1..51: mol_type = other DNA
gtttgttaagatggcagagcccggtratcgcataaaacttaaaactttaca

SEQ ID NO: 3633 - DNA, 51 bp, synthetic construct
  misc_feature 1..51: note = Synthetic polynucleotide
  source 1..51: mol_type = other DNA
gatggcagagcccggtaatcgcataraacttaaaactttacagtcagaggt

SEQ ID NO: 3634 - DNA, 51 bp, synthetic construct
  misc_feature 1..51: note = Synthetic polynucleotide
  source 1..51: mol_type = other DNA
gtaatcgcataaaacttaaaactttrcagtcagaggttcaattcctcttct

SEQ ID NO: 3635 - DNA, 51 bp, synthetic construct
  misc_feature 1..51: note = Synthetic polynucleotide
  source 1..51: mol_type = other DNA
gatagagtaaataataggagcttaarcccccttatttctaggactatgaga

SEQ ID NO: 3636 - DNA, 51 bp, synthetic construct
  misc_feature 1..51: note = Synthetic polynucleotide
  source 1..51: mol_type = other DNA
gcattccccctcaaacctaagaaatrtgtctgataaaagagttactttgat

SEQ ID NO: 3637 - DNA, 51 bp, synthetic construct
  misc_feature 1..51: note = Synthetic polynucleotide
  source 1..51: mol_type = other DNA
tgtctgataaaagagttactttgatrgagtaaataataggagcttaaaccc

SEQ ID NO: 3638 - DNA, 51 bp, synthetic construct
  misc_feature 1..51: note = Synthetic polynucleotide
  source 1..51: mol_type = other DNA
gataaaagagttactttgatagagtraataataggagcttaaaccccctta

SEQ ID NO: 3639 - DNA, 51 bp, synthetic construct
  misc_feature 1..51: note = Synthetic polynucleotide
  source 1..51: mol_type = other DNA
cttccaattaactagttttgacaacrttcaaaaaagagtaataaacttcgc

SEQ ID NO: 3640 - DNA, 51 bp, synthetic construct
  misc_feature 1..51: note = Synthetic polynucleotide
  source 1..51: mol_type = other DNA
tccatgactttttcaaaaaggtattrgaaaaaccatttcataactttgtca

SEQ ID NO: 3641 - DNA, 51 bp, synthetic construct
  misc_feature 1..51: note = Synthetic polynucleotide
  source 1..51: mol_type = other DNA
agtttaaacaaaacgaatgatttcgrctcattaaattatgataatcatatt

SEQ ID NO: 3642 - DNA, 51 bp, synthetic construct
  misc_feature 1..51: note = Synthetic polynucleotide
  source 1..51: mol_type = other DNA
acccctacgcatttatatagaggagrcaagtcgtaacatggtaagtgtact

SEQ ID NO: 3643 - DNA, 51 bp, synthetic construct
  misc_feature 1..51: note = Synthetic polynucleotide
  misc_difference 26: note = n is a, c, g, t or u
  source 1..51: mol_type = other DNA
cacccccacgggaaacagcagtgatnarcctttagcaataaacgaaagttt

SEQ ID NO: 3644 - DNA, 51 bp, synthetic construct
  misc_feature 1..51: note = Synthetic polynucleotide
  source 1..51: mol_type = other DNA
cccgaatgatatttcctattcgcctrcacaattctccgatccgtccctaac

SEQ ID NO: 3645 - DNA, 51 bp, synthetic construct
  misc_feature 1..51: note = Synthetic polynucleotide
  source 1..51: mol_type = other DNA
tccaaagacaaccatcattccccctraataaattaaaaaaactattaaacc

SEQ ID NO: 3646 - DNA, 51 bp, synthetic construct
  misc_feature 1..51: note = Synthetic polynucleotide
  source 1..51: mol_type = other DNA
ctattccaactgttcatcggctgagrgggcgtaggaattatatccttcttg

SEQ ID NO: 3647 - DNA, 51 bp, synthetic construct
  misc_feature 1..51: note = Synthetic polynucleotide
  source 1..51: mol_type = other DNA
ctccctacaaatctccttaattatarcattcacagccacagaactaatcat

SEQ ID NO: 3648 - DNA, 51 bp, synthetic construct
  misc_feature 1..51: note = Synthetic polynucleotide
  source 1..51: mol_type = other DNA
taccgaacgaaaaattctaggctatrtacaactacgcaaaggccccaacgt

SEQ ID NO: 3649 - DNA, 51 bp, synthetic construct
  misc_feature 1..51: note = Synthetic polynucleotide
  source 1..51: mol_type = other DNA
ctgttcttatgaattcgaacagcatrcccccgattccgctacgaccaactc

SEQ ID NO: 3650 - DNA, 51 bp, synthetic construct
  misc_feature 1..51: note = Synthetic polynucleotide
  misc_difference 26: note = n is a, c, g, t or u
  source 1..51: mol_type = other DNA
ccgtttactcaatcctctgatcaggntgagcatcaaactcaaactacgccc

SEQ ID NO: 3651 - DNA, 51 bp, synthetic construct
  misc_feature 1..51: note = Synthetic polynucleotide
  source 1..51: mol_type = other DNA
aataagtggctcctttaacctctccdcccttatcacaacacaagaacacct

SEQ ID NO: 3652 - DNA, 51 bp, synthetic construct
  misc_feature 1..51: note = Synthetic polynucleotide
  misc_difference 26: note = n is a, c, g, t or u
  source 1..51: mol_type = other DNA
acccccttgaccttgccgaaggggantccgaactagtctcaggcttcaaca

SEQ ID NO: 3653 - DNA, 51 bp, synthetic construct
  misc_feature 1..51: note = Synthetic polynucleotide
  misc_difference 26: note = n is a, c, g, t or u
  source 1..51: mol_type = other DNA
cgaatacgccgcaggccccttcgccntattcttcatagccgaatacacaaa

SEQ ID NO: 3654 - DNA, 51 bp, synthetic construct
  misc_feature 1..51: note = Synthetic polynucleotide
  misc_difference 26: note = n is a, c, g, t or u
  source 1..51: mol_type = other DNA
attttgtcaccaagaccctacttctnacctccctgttcttatgaattcgaa

SEQ ID NO: 3655 - DNA, 51 bp, synthetic construct
  misc_feature 1..51: note = Synthetic polynucleotide
  source 1..51: mol_type = other DNA
aatgaatccacatatccgggtgacargccaccagaaccgtgtgggtcctga

SEQ ID NO: 3656 - DNA, 51 bp, synthetic construct
  misc_feature 1..51: note = Synthetic polynucleotide
  source 1..51: mol_type = other DNA
gatcaaaaggatttgcccactgggcytaaaatacaaagaaaagagaggtgt

SEQ ID NO: 3657 - DNA, 51 bp, synthetic construct
  misc_feature 1..51: note = Synthetic polynucleotide
  source 1..51: mol_type = other DNA
accaatgtcaactccaggatgctctrcttcgcccctgatctggttttcaat

SEQ ID NO: 3658 - DNA, 51 bp, synthetic construct
  misc_feature 1..51: note = Synthetic polynucleotide
  source 1..51: mol_type = other DNA
ccggatgtacagccagtgtgtccgartgaggcacctctctcaagagtttgg

SEQ ID NO: 3659 - DNA, 51 bp, synthetic construct
  misc_feature 1..51: note = Synthetic polynucleotide
  source 1..51: mol_type = other DNA
gattgcgagagagctgcatcagttcrcttttgacctgctaatcaagtcaca

SEQ ID NO: 3660 - DNA, 51 bp, synthetic construct
  misc_feature 1..51: note = Synthetic polynucleotide
  source 1..51: mol_type = other DNA
atgatggcagagatcatctctgtgcragtgcccaagatcctttctgggaaa

SEQ ID NO: 3661 - DNA, 51 bp, synthetic construct
  misc_feature 1..51: note = Synthetic polynucleotide
  source 1..51: mol_type = other DNA
ccaatctcagccaagcttgttgcaartatgctatctgtagcaggtgcagat

SEQ ID NO: 3662 - DNA, 51 bp, synthetic construct
  misc_feature 1..51: note = Synthetic polynucleotide
  source 1..51: mol_type = other DNA
cttgactataatgaatacttcagggrtttgaatgtaagtaattgcttcttt

SEQ ID NO: 3663 - DNA, 51 bp, synthetic construct
  misc_feature 1..51: note = Synthetic polynucleotide
  source 1..51: mol_type = other DNA
tgtaggactgaacgtcttgctcgagrtgtgatgaaggagatgggaggccat

SEQ ID NO: 3664 - DNA, 51 bp, synthetic construct
  misc_feature 1..51: note = Synthetic polynucleotide
  source 1..51: mol_type = other DNA
cctgaagtgcactcaatattcctcgraggtcacacatttcttgtgaggaac

SEQ ID NO: 3665 - DNA, 51 bp, synthetic construct
  misc_feature 1..51: note = Synthetic polynucleotide
  source 1..51: mol_type = other DNA
gctgcagtggagaggctctgggattrtgggatgagtagctccccacatgtt

SEQ ID NO: 3666 - DNA, 51 bp, synthetic construct
  misc_feature 1..51: note = Synthetic polynucleotide
  source 1..51: mol_type = other DNA
ttctctgtgtccttctccagcaatcratggctacataatggatacactacc

SEQ ID NO: 3667 - DNA, 51 bp, synthetic construct
  misc_feature 1..51: note = Synthetic polynucleotide
  source 1..51: mol_type = other DNA
tacagtggtcattacacttaagaacrtggcttcccatcctgtcagtcttca

SEQ ID NO: 3668 - DNA, 51 bp, synthetic construct
  misc_feature 1..51: note = Synthetic polynucleotide
  source 1..51: mol_type = other DNA
tttcttcctgctataggagctgaatrtgatgatcagaccagtcaaagggag

SEQ ID NO: 3669 - DNA, 51 bp, synthetic construct
  misc_feature 1..51: note = Synthetic polynucleotide
  source 1..51: mol_type = other DNA
cctgctataggagctgaatatgatgrtcagaccagtcaaagggagaaagaa

SEQ ID NO: 3670 - DNA, 51 bp, synthetic construct
  misc_feature 1..51: note = Synthetic polynucleotide
  source 1..51: mol_type = other DNA
ggaaatctcgccaataactttccttrctgctcaaacactcttgatggacct

SEQ ID NO: 3671 - DNA, 51 bp, synthetic construct
  misc_feature 1..51: note = Synthetic polynucleotide
  source 1..51: mol_type = other DNA
tgggtacattacattgctgctgaagrggaggactgggactatgctccctta

SEQ ID NO: 3672 - DNA, 51 bp, synthetic construct
  misc_feature 1..51: note = Synthetic polynucleotide
  source 1..51: mol_type = other DNA
cagcggattggtaggaagtacaaaaragtccgatttatggcatacacagat

SEQ ID NO: 3673 - DNA, 51 bp, synthetic construct
  misc_feature 1..51: note = Synthetic polynucleotide
  source 1..51: mol_type = other DNA
tcaggaatcttgggacctttactttrtggggaagttggagacacactgttg

SEQ ID NO: 3674 - DNA, 51 bp, synthetic construct
  misc_feature 1..51: note = Synthetic polynucleotide
  source 1..51: mol_type = other DNA
tcggtgcctgacccgctattactctrgtttcgttaatatggagagagatct

SEQ ID NO: 3675 - DNA, 51 bp, synthetic construct
  misc_feature 1..51: note = Synthetic polynucleotide
  source 1..51: mol_type = other DNA
tctagtttcgttaatatggagagagrtctagcttcaggactcattggccct

SEQ ID NO: 3676 - DNA, 51 bp, synthetic construct
  misc_feature 1..51: note = Synthetic polynucleotide
  source 1..51: mol_type = other DNA
gaggatccagagttccaagcctccarcatcatgcacagtgagtaaagcagc

SEQ ID NO: 3677 - DNA, 51 bp, synthetic construct
  misc_feature 1..51: note = Synthetic polynucleotide
  source 1..51: mol_type = other DNA
ttccctccctaggaaaaagatgtgcrctcaggcctgattggaccccttctg

SEQ ID NO: 3678 - DNA, 51 bp, synthetic construct
  misc_feature 1..51: note = Synthetic polynucleotide
  source 1..51: mol_type = other DNA
tctctgtgtccttctccagcaatcartggctacataatggatacactacct

SEQ ID NO: 3679 - DNA, 51 bp, synthetic construct
  misc_feature 1..51: note = Synthetic polynucleotide
  source 1..51: mol_type = other DNA
agcacactttttctggtgtacagcartagtgagtagcaatgtgggcagagg

SEQ ID NO: 3680 - DNA, 51 bp, synthetic construct
  misc_feature 1..51: note = Synthetic polynucleotide
  source 1..51: mol_type = other DNA
aagtgttattttaattggtaggtggrtctgttggcaccaatgattattcac

SEQ ID NO: 3681 - DNA, 51 bp, synthetic construct
  misc_feature 1..51: note = Synthetic polynucleotide
  source 1..51: mol_type = other DNA
tacatctctcagtttatcatcatgtrtagtcttgatgggaagaagtggcag

SEQ ID NO: 3682 - DNA, 51 bp, synthetic construct
  misc_feature 1..51: note = Synthetic polynucleotide
  source 1..51: mol_type = other DNA
atgaaagtcacaggagtaactactcrgggagtaaaatctctgcttaccagc

SEQ ID NO: 3683 - DNA, 51 bp, synthetic construct
  misc_feature 1..51: note = Synthetic polynucleotide
  source 1..51: mol_type = other DNA
ggtgcagtggaactgtcatgggactrtatgcaaagtgatctcggtgagctg

SEQ ID NO: 3684 - DNA, 51 bp, synthetic construct
  misc_feature 1..51: note = Synthetic polynucleotide
  source 1..51: mol_type = other DNA
caactcctatgtggctggccagtacratgatgcagcctcctaccagcgcct

SEQ ID NO: 3685 - DNA, 51 bp, synthetic construct
  misc_feature 1..51: note = Synthetic polynucleotide
  source 1..51: mol_type = other DNA
gctccgggctcccagcagaggctggraccgcatcatcgtggagaagccctt

SEQ ID NO: 3686 - DNA, 51 bp, synthetic construct
  misc_feature 1..51: note = Synthetic polynucleotide
  source 1..51: mol_type = other DNA
acagccactccactgtggcggagggrcaggacaggccactacctatgcaac

SEQ ID NO: 3687 - DNA, 51 bp, synthetic construct
  misc_feature 1..51: note = Synthetic polynucleotide
  source 1..51: mol_type = other DNA
cagcctggctgcaacagcgtttgctrtgaccaattcttccccatctcccat

SEQ ID NO: 3688 - DNA, 51 bp, synthetic construct
  misc_feature 1..51: note = Synthetic polynucleotide
  source 1..51: mol_type = other DNA
gcctctggcatctgcatcatcctcartgtggccgaggtggtgtacctcatc

SEQ ID NO: 3689 - DNA, 51 bp, synthetic construct
  misc_feature 1..51: note = Synthetic polynucleotide
  source 1..51: mol_type = other DNA
ccgtcctgtacactttgagctcatgrgtgagtgggaacgttcctacttcgg

SEQ ID NO: 3690 - DNA, 51 bp, synthetic construct
  misc_feature 1..51: note = Synthetic polynucleotide
  source 1..51: mol_type = other DNA
ggctatgtgaccatgtcggtgggaaragtctttcaccctggtactgctcca

SEQ ID NO: 3691 - DNA, 51 bp, synthetic construct
  misc_feature 1..51: note = Synthetic polynucleotide
  source 1..51: mol_type = other DNA
tatggatgctgtcgcttccttcgagrtggttataaaactccaagagaggtt

SEQ ID NO: 3692 - DNA, 51 bp, synthetic construct
  misc_feature 1..51: note = Synthetic polynucleotide
  source 1..51: mol_type = other DNA
ttatggaatgtgggagcgtggagatragactaatcagggcatcccggaatt

SEQ ID NO: 3693 - DNA, 51 bp, synthetic construct
  misc_feature 1..51: note = Synthetic polynucleotide
  source 1..51: mol_type = other DNA
cgctccgatcatgagtttctcttccrttactgcaacgcctacttaaatgct

SEQ ID NO: 3694 - DNA, 51 bp, synthetic construct
  misc_feature 1..51: note = Synthetic polynucleotide
  source 1..51: mol_type = other DNA
ttcaatttcttaacctatctcaaagrtggagatcagtgtgagtccaatcca

SEQ ID NO: 3695 - DNA, 51 bp, synthetic construct
  misc_feature 1..51: note = Synthetic polynucleotide
  source 1..51: mol_type = other DNA
tgtttaaatggcggcagttgcaaggrtgacattaattcctatgaatgttgg

SEQ ID NO: 3696 - DNA, 51 bp, synthetic construct
  misc_feature 1..51: note = Synthetic polynucleotide
  source 1..51: mol_type = other DNA
cgaattattcctcaccacaactacartgcagctattaataagtacaaccat

SEQ ID NO: 3697 - DNA, 51 bp, synthetic construct
  misc_feature 1..51: note = Synthetic polynucleotide
  source 1..51: mol_type = other DNA
tacaaagttcaccatctataacaacrtgttctgtgctggcttccatgaagg

SEQ ID NO: 3698 - DNA, 51 bp, synthetic construct
  misc_feature 1..51: note = Synthetic polynucleotide
  source 1..51: mol_type = other DNA
aggtagagattcatgtcaaggagatrgtgggggaccccatgttactgaagt

SEQ ID NO: 3699 - DNA, 51 bp, synthetic construct
  misc_feature 1..51: note = Synthetic polynucleotide
  source 1..51: mol_type = other DNA
cctcgacgctgcatgaggcaccactrtgtggattctatcagtcacccattg

SEQ ID NO: 3700 - DNA, 51 bp, synthetic construct
  misc_feature 1..51: note = Synthetic polynucleotide
  source 1..51: mol_type = other DNA
tctagagaagtttttccttacaacartgagaaaacatgtactagctgcatc

SEQ ID NO: 3701 - DNA, 51 bp, synthetic construct
  misc_feature 1..51: note = Synthetic polynucleotide
  source 1..51: mol_type = other DNA
tcggaccctcgacgctgcatgaggcrccactatgtggattctatcagtcac

SEQ ID NO: 3702 - DNA, 51 bp, synthetic construct
  misc_feature 1..51: note = Synthetic polynucleotide
  source 1..51: mol_type = other DNA
ggctatcatggctgctcctttattcrtgtctaatgacctccgacacatcag

SEQ ID NO: 3703 - DNA, 51 bp, synthetic construct
  misc_feature 1..51: note = Synthetic polynucleotide
  source 1..51: mol_type = other DNA
atccctggggctagagcactggacartggattggcaaggacgcctaccatg

SEQ ID NO: 3704 - DNA, 51 bp, synthetic construct
  misc_feature 1..51: note = Synthetic polynucleotide
  source 1..51: mol_type = other DNA
gagtcatatctgttttcacagcccarttatacagaaatccgacagtactgc

SEQ ID NO: 3705 - DNA, 51 bp, synthetic construct
  misc_feature 1..51: note = Synthetic polynucleotide
  source 1..51: mol_type = other DNA
aaggttaagaagtcacataaatcccrcaggcactgttttgcttcagctaga

SEQ ID NO: 3706 - DNA, 51 bp, synthetic construct
  misc_feature 1..51: note = Synthetic polynucleotide
  source 1..51: mol_type = other DNA
tctttttctcagttagtgattggcarctttggcctcagctggaatcagcaa

SEQ ID NO: 3707 - DNA, 51 bp, synthetic construct
  misc_feature 1..51: note = Synthetic polynucleotide
  source 1..51: mol_type = other DNA
agaagataaagagaaaaaagaaacaraagagaaatctcatttatccacctc

SEQ ID NO: 3708 - DNA, 51 bp, synthetic construct
  misc_feature 1..51: note = Synthetic polynucleotide
  source 1..51: mol_type = other DNA
gcagaaactggcccccttcctcaagrtgtatggtgagtatgtgaagaactt

SEQ ID NO: 3709 - DNA, 51 bp, synthetic construct
  misc_feature 1..51: note = Synthetic polynucleotide
  source 1..51: mol_type = other DNA
gcggagccctggggccgtcgcacctrtgtcacctggattgccctgatggtg

SEQ ID NO: 3710 - DNA, 51 bp, synthetic construct
  misc_feature 1..51: note = Synthetic polynucleotide
  source 1..51: mol_type = other DNA
atgacgctagtgattgtggtcgtctrtgtgctgtgctgggcacccttcttc

SEQ ID NO: 3711 - DNA, 51 bp, synthetic construct
  misc_feature 1..51: note = Synthetic polynucleotide
  source 1..51: mol_type = other DNA
atcaagttcatccccacttataagtrtgactctaaaacagaccggtgggat

SEQ ID NO: 3712 - DNA, 51 bp, synthetic construct
  misc_feature 1..51: note = Synthetic polynucleotide
  source 1..51: mol_type = other DNA
caactggacaggaatctcacctttcrtaaaatggtggcatggatgattgca

SEQ ID NO: 3713 - DNA, 51 bp, synthetic construct
  misc_feature 1..51: note = Synthetic polynucleotide
  source 1..51: mol_type = other DNA
gctgtgcaccatgatgaggagaaagrtgtgatcacaggcctgaaacaaaag

SEQ ID NO: 3714 - DNA, 51 bp, synthetic construct
  misc_feature 1..51: note = Synthetic polynucleotide
  source 1..51: mol_type = other DNA
tggaacaggatgtttcttactatgtratacaggccataaggttggtttttt

SEQ ID NO: 3715 - DNA, 51 bp, synthetic construct
  misc_feature 1..51: note = Synthetic polynucleotide
  source 1..51: mol_type = other DNA
cggccccacagcgggctcccttactrctggaatgcagacacagaccttgta

SEQ ID NO: 3716 - DNA, 51 bp, synthetic construct
  misc_feature 1..51: note = Synthetic polynucleotide
  source 1..51: mol_type = other DNA
ctgaacctgattgtactttgtttgcrgtcccatcccccagaggatgaagat

SEQ ID NO: 3717 - DNA, 51 bp, synthetic construct
  misc_feature 1..51: note = Synthetic polynucleotide
  source 1..51: mol_type = other DNA
caccattggagaataacttttattartaagtgctatgagctctgtgacact

SEQ ID NO: 3718 - DNA, 51 bp, synthetic construct
  misc_feature 1..51: note = Synthetic polynucleotide
  source 1..51: mol_type = other DNA
gccatgctgatgttggatagcttctrtaggagcattgaagggttcgaaata

SEQ ID NO: 3719 - DNA, 51 bp, synthetic construct
  misc_feature 1..51: note = Synthetic polynucleotide
  source 1..51: mol_type = other DNA
taattaaaacaaattatcttcatcartttattcagcgaataggtcatggtg

SEQ ID NO: 3720 - DNA, 51 bp, synthetic construct
  misc_feature 1..51: note = Synthetic polynucleotide
  source 1..51: mol_type = other DNA
aggaaaactgcatatatttaatgccragaaggcagctgcccattataagtg

SEQ ID NO: 3721 - DNA, 51 bp, synthetic construct
  misc_feature 1..51: note = Synthetic polynucleotide
  source 1..51: mol_type = other DNA
gaaaatgaagcacgaggaaaactgcrtatatttaatgccaagaaggcagct

SEQ ID NO: 3722 - DNA, 51 bp, synthetic construct
  misc_feature 1..51: note = Synthetic polynucleotide
  source 1..51: mol_type = other DNA
cacagtccagctcacaacaacatcargagcagaatttggagactttgatat

SEQ ID NO: 3723 - DNA, 51 bp, synthetic construct
  misc_feature 1..51: note = Synthetic polynucleotide
  source 1..51: mol_type = other DNA
gcctccgcctgagcccgcacccgccrtggacaactacgcagatctttcgga

SEQ ID NO: 3724 - DNA, 51 bp, synthetic construct
  misc_feature 1..51: note = Synthetic polynucleotide
  source 1..51: mol_type = other DNA
ggccatagagcgagaaaaagctgagragttcagaaaactgcaagatgccag

SEQ ID NO: 3725 - DNA, 51 bp, synthetic construct
  misc_feature 1..51: note = Synthetic polynucleotide
  source 1..51: mol_type = other DNA
tctacgaaagcaggctgaggaggtcratactgagtgggaaaaattgaacct

SEQ ID NO: 3726 - DNA, 51 bp, synthetic construct
  misc_feature 1..51: note = Synthetic polynucleotide
  source 1..51: mol_type = other DNA
actgagtgggaaaaattgaacctgcrctccgctgactggcagagaaaaata

SEQ ID NO: 3727 - DNA, 51 bp, synthetic construct
  misc_feature 1..51: note = Synthetic polynucleotide
  source 1..51: mol_type = other DNA
tcccccaaacccttctctgcagatcrcggtcagtctagcacagggatatga

SEQ ID NO: 3728 - DNA, 51 bp, synthetic construct
  misc_feature 1..51: note = Synthetic polynucleotide
  source 1..51: mol_type = other DNA
tcgatcgcacttcagttatgataaaytgaccttgttatgtgatcaataatc

SEQ ID NO: 3729 - DNA, 51 bp, synthetic construct
  misc_feature 1..51: note = Synthetic polynucleotide
  source 1..51: mol_type = other DNA
atcgccctccctgctaccttcgtcarcagtgccatccgttacctggagggc

SEQ ID NO: 3730 - DNA, 51 bp, synthetic construct
  misc_feature 1..51: note = Synthetic polynucleotide
  source 1..51: mol_type = other DNA
tttgatttctttttttttcattggcrgatcatgatcaggagcatttttttg

SEQ ID NO: 3731 - DNA, 51 bp, synthetic construct
  misc_feature 1..51: note = Synthetic polynucleotide
  source 1..51: mol_type = other DNA
gagaggccagtacgacgtggccatcragatgatcaaagaaggctccatgtc

SEQ ID NO: 3732 - DNA, 51 bp, synthetic construct
  misc_feature 1..51: note = Synthetic polynucleotide
  source 1..51: mol_type = other DNA
agcaccatccctgagctcattaactrccatcagcacaactctgcaggtgag

SEQ ID NO: 3733 - DNA, 51 bp, synthetic construct
  misc_feature 1..51: note = Synthetic polynucleotide
  source 1..51: mol_type = other DNA
ggggaaagaaggaggtttcattgtcrgagactccagcaaagctggcaaata

SEQ ID NO: 3734 - DNA, 51 bp, synthetic construct
  misc_feature 1..51: note = Synthetic polynucleotide
  source 1..51: mol_type = other DNA
caccttctaggggttttgatgtgggraatttactccctggggaagatgcca

SEQ ID NO: 3735 - DNA, 51 bp, synthetic construct
  misc_feature 1..51: note = Synthetic polynucleotide
  source 1..51: mol_type = other DNA
ctacacgcacccgagctccctgcgcraacacatgaaggtaattacctcttt

SEQ ID NO: 3736 - DNA, 51 bp, synthetic construct
  misc_feature 1..51: note = Synthetic polynucleotide
  source 1..51: mol_type = other DNA
gccatcatcgagaacccattcctcartggagaggtcatccggctggatggg

SEQ ID NO: 3737 - DNA, 51 bp, synthetic construct
  misc_feature 1..51: note = Synthetic polynucleotide
  source 1..51: mol_type = other DNA
caagtgccagtatcaggcccctgatrtggacaccctgcagatacatgtcat

SEQ ID NO: 3738 - DNA, 51 bp, synthetic construct
  misc_feature 1..51: note = Synthetic polynucleotide
  source 1..51: mol_type = other DNA
atacatgtcatggagtgcattgagtrgggccggccagtgcaaggccactgc

SEQ ID NO: 3739 - DNA, 51 bp, synthetic construct
  misc_feature 1..51: note = Synthetic polynucleotide
  source 1..51: mol_type = other DNA
ttggacattgccttcttgttactctrtttcaatgatactcataaaagcatt

SEQ ID NO: 3740 - DNA, 51 bp, synthetic construct
  misc_feature 1..51: note = Synthetic polynucleotide
  source 1..51: mol_type = other DNA
aaggtgaagaacaccatctactgcarcgtggagccatcggaatcaaatatg

SEQ ID NO: 3741 - DNA, 51 bp, synthetic construct
  misc_feature 1..51: note = Synthetic polynucleotide
  source 1..51: mol_type = other DNA
ggcaagaaaaagaagcagtacaaagrtaaatatttggcaaagcacaatgca

SEQ ID NO: 3742 - DNA, 51 bp, synthetic construct
  misc_feature 1..51: note = Synthetic polynucleotide
  source 1..51: mol_type = other DNA
acttcgggtggagaagacagggcacrgtggtactctggatcccaaggtgac

SEQ ID NO: 3743 - DNA, 51 bp, synthetic construct
  misc_feature 1..51: note = Synthetic polynucleotide
  source 1..51: mol_type = other DNA
attaatgaccacagcggtcatctctrcctgcgaccatggtatagtagccaa

SEQ ID NO: 3744 - DNA, 51 bp, synthetic construct
  misc_feature 1..51: note = Synthetic polynucleotide
  source 1..51: mol_type = other DNA
gttctgtaatcgaagacaaaaagagraaagaatgactccgccaggggatca

SEQ ID NO: 3745 - DNA, 51 bp, synthetic construct
  misc_feature 1..51: note = Synthetic polynucleotide
  source 1..51: mol_type = other DNA
gggcggtgtgtgccgcacacgcaccrtgaagatcatcatgaaggttgggca

SEQ ID NO: 3746 - DNA, 51 bp, synthetic construct
  misc_feature 1..51: note = Synthetic polynucleotide
  source 1..51: mol_type = other DNA
ttcttataggtggtaagttttcttcrtacagttcttttgtgtgacaaactg

SEQ ID NO: 3747 - DNA, 51 bp, synthetic construct
  misc_feature 1..51: note = Synthetic polynucleotide
  source 1..51: mol_type = other DNA
ttcttttgatcaggtgtgggcaatavtagtgaaggtggaagaggaaaggca

SEQ ID NO: 3748 - DNA, 51 bp, synthetic construct
  misc_feature 1..51: note = Synthetic polynucleotide
  source 1..51: mol_type = other DNA
ggacaaactaagcctgtttatgtatrtaggttcttagctcaggtaggttta

SEQ ID NO: 3749 - DNA, 51 bp, synthetic construct
  misc_feature 1..51: note = Synthetic polynucleotide
  source 1..51: mol_type = other DNA
agaagaagagttgactgaagaagaargaaaagcagcttgggctgagtatga

SEQ ID NO: 3750 - DNA, 51 bp, synthetic construct
  misc_feature 1..51: note = Synthetic polynucleotide
  source 1..51: mol_type = other DNA
gtagcaatggtgggagatggaatcartgactccccagctctggcaatggct

SEQ ID NO: 3751 - DNA, 51 bp, synthetic construct
  misc_feature 1..51: note = Synthetic polynucleotide
  source 1..51: mol_type = other DNA
ggaaaagcctttcgctctaaagtggrgttgattgcgtacttcgaaaaggta

SEQ ID NO: 3752 - DNA, 51 bp, synthetic construct
  misc_feature 1..51: note = Synthetic polynucleotide
  source 1..51: mol_type = other DNA
catagacctggggaatggtcagaccrggaagtttctgctggacggggatga

SEQ ID NO: 3753 - DNA, 51 bp, synthetic construct
  misc_feature 1..51: note = Synthetic polynucleotide
  source 1..51: mol_type = other DNA
ccctttgctgtgcccaacccgaagcrggtaagcacattctctgcaggaagc

SEQ ID NO: 3754 - DNA, 51 bp, synthetic construct
  misc_feature 1..51: note = Synthetic polynucleotide
  source 1..51: mol_type = other DNA
gctgccccctttgatgatgatgacargatcgttgggggctacaactgtgag

SEQ ID NO: 3755 - DNA, 51 bp, synthetic construct
  misc_feature 1..51: note = Synthetic polynucleotide
  source 1..51: mol_type = other DNA
cacttctgtggtggctccctcatcarcgaacagtgggtggtatcagcaggc

SEQ ID NO: 3756 - DNA, 51 bp, synthetic construct
  misc_feature 1..51: note = Synthetic polynucleotide
  source 1..51: mol_type = other DNA
aaccaatcaaattccaatgcttattrgaaggaaagaaacaaaggattatgg

SEQ ID NO: 3757 - DNA, 51 bp, synthetic construct
  misc_feature 1..51: note = Synthetic polynucleotide
  source 1..51: mol_type = other DNA
atgaatgtgagctggtcagctgatcrcagagttattgatggtgctacaatg

SEQ ID NO: 3758 - DNA, 51 bp, synthetic construct
  misc_feature 1..51: note = Synthetic polynucleotide
  source 1..51: mol_type = other DNA
ttggttgtagacagtctgcattgagraaaatgaaacacttggtggaacatg

SEQ ID NO: 3759 - DNA, 51 bp, synthetic construct
  misc_feature 1..51: note = Synthetic polynucleotide
  source 1..51: mol_type = other DNA
cttgcagaccttatcagaagcttttrgagaagcaaatcttgctgcgtcatt

SEQ ID NO: 3760 - DNA, 51 bp, synthetic construct
  misc_feature 1..51: note = Synthetic polynucleotide
  source 1..51: mol_type = other DNA
cattggtgatgtagttgctggtccartgctggctcacaaagcagaggatga

SEQ ID NO: 3761 - DNA, 51 bp, synthetic construct
  misc_feature 1..51: note = Synthetic polynucleotide
  source 1..51: mol_type = other DNA
cgcaggacaccgctctatgacttccrcctggcccacggcgggaaaatggtg

SEQ ID NO: 3762 - DNA, 51 bp, synthetic construct
  misc_feature 1..51: note = Synthetic polynucleotide
  source 1..51: mol_type = other DNA
ggctcaacctcgtctttaagtggtargaaccatatagagaggagatcagca

SEQ ID NO: 3763 - DNA, 51 bp, synthetic construct
  misc_feature 1..51: note = Synthetic polynucleotide
  source 1..51: mol_type = other DNA
cagcatttggatctgttttaggcctrtggaggtgcctatgatgtcatgagc

SEQ ID NO: 3764 - DNA, 51 bp, synthetic construct
  misc_feature 1..51: note = Synthetic polynucleotide
  source 1..51: mol_type = other DNA
ccagatgtgctcaagtctcgattccrgactggtgagtggaaggtagtgggg

SEQ ID NO: 3765 - DNA, 51 bp, synthetic construct
  misc_feature 1..51: note = Synthetic polynucleotide
  source 1..51: mol_type = other DNA
tctgctcgtgtttgactatgaaggargcggttccgaagctgctagtctgag

SEQ ID NO: 3766 - DNA, 51 bp, synthetic construct
  misc_feature 1..51: note = Synthetic polynucleotide
  source 1..51: mol_type = other DNA
gtcgatctctctgcagagtttccctdcgtataccctggtggttcaagctgc

SEQ ID NO: 3767 - DNA, 51 bp, synthetic construct
  misc_feature 1..51: note = Synthetic polynucleotide
  source 1..51: mol_type = other DNA
tgccacgccctggccacatgtgtcartgtggtgggcagctacttgtgcgta

SEQ ID NO: 3768 - DNA, 51 bp, synthetic construct
  misc_feature 1..51: note = Synthetic polynucleotide
  source 1..51: mol_type = other DNA
gctgatgctttgggcaaaatccctcrgacagtaagaagattctataccatg

SEQ ID NO: 3769 - DNA, 51 bp, synthetic construct
  misc_feature 1..51: note = Synthetic polynucleotide
  source 1..51: mol_type = other DNA
tgacatcctccctattttgcatctcrggtcacccgatgacccgtgccttta

SEQ ID NO: 3770 - DNA, 51 bp, synthetic construct
  misc_feature 1..51: note = Synthetic polynucleotide
  source 1..51: mol_type = other DNA
acgatacttgttaagtggctaccccraaacgatctgcttggtatgttgggc

SEQ ID NO: 3771 - DNA, 51 bp, synthetic construct
  misc_feature 1..51: note = Synthetic polynucleotide
  source 1..51: mol_type = other DNA
gcccttgtttggtgatcagatggacvatgcaaagcgcatggagactaaggg

SEQ ID NO: 3772 - DNA, 51 bp, synthetic construct
  misc_feature 1..51: note = Synthetic polynucleotide
  source 1..51: mol_type = other DNA
tctctccccgcaggaatcctgtactrtgtctacatggggctgctggcagtg

SEQ ID NO: 3773 - DNA, 51 bp, synthetic construct
  misc_feature 1..51: note = Synthetic polynucleotide
  source 1..51: mol_type = other DNA
cccacccacgtcaacaacggcaactrcacgctgctggctgccaaccccttc

SEQ ID NO: 3774 - DNA, 51 bp, synthetic construct
  misc_feature 1..51: note = Synthetic polynucleotide
  source 1..51: mol_type = other DNA
ctgcaccgagggccgccccctgctcrtggtctttgagtatatgcggcacgg

SEQ ID NO: 3775 - DNA, 51 bp, synthetic construct
  misc_feature 1..51: note = Synthetic polynucleotide
  source 1..51: mol_type = other DNA
ctccaggaaaaccgggaggtgggagrctggcgcaagaacatcgatgcactg

SEQ ID NO: 3776 - DNA, 51 bp, synthetic construct
  misc_feature 1..51: note = Synthetic polynucleotide
  source 1..51: mol_type = other DNA
gcgggcccacctcaagcaggtgaagraggaggacaccgagaaggtgagtgt

SEQ ID NO: 3777 - DNA, 51 bp, synthetic construct
  misc_feature 1..51: note = Synthetic polynucleotide
  source 1..51: mol_type = other DNA
attgagagcgacctggaacgtgcagdggagcgggctgagctctcagaaggg

SEQ ID NO: 3778 - DNA, 51 bp, synthetic construct
  misc_feature 1..51: note = Synthetic polynucleotide
  source 1..51: mol_type = other DNA
cctggcctatgagcctgtgtgggccrttggtactggcaagactgcaacacc

SEQ ID NO: 3779 - DNA, 51 bp, synthetic construct
  misc_feature 1..51: note = Synthetic polynucleotide
  source 1..51: mol_type = other DNA
aatggcctggtctacatgaagtacgrcacgcctttcatttttgctgaggtg

SEQ ID NO: 3780 - DNA, 51 bp, synthetic construct
  misc_feature 1..51: note = Synthetic polynucleotide
  source 1..51: mol_type = other DNA
ccctgtgtttgctggctttcttcacrgaagtaaaagattatgagcctccat

SEQ ID NO: 3781 - DNA, 51 bp, synthetic construct
  misc_feature 1..51: note = Synthetic polynucleotide
  source 1..51: mol_type = other DNA
gctataggtgggaactgcaagatacrtggctccagaagtcctagaatccag

SEQ ID NO: 3782 - DNA, 51 bp, synthetic construct
  misc_feature 1..51: note = Synthetic polynucleotide
  source 1..51: mol_type = other DNA
cattttgaatccttcaaacgtgctgrcatctatgcaatgggcttagtattc

SEQ ID NO: 3783 - DNA, 51 bp, synthetic construct
  misc_feature 1..51: note = Synthetic polynucleotide
  source 1..51: mol_type = other DNA
ctgccatgccagccgcttcctgcacrtgaaggtggaatgccccacagaact

SEQ ID NO: 3784 - DNA, 51 bp, synthetic construct
  misc_feature 1..51: note = Synthetic polynucleotide
  source 1..51: mol_type = other DNA
ccatgccagccgcttcctgcacatgraggtggaatgccccacagaactctt

SEQ ID NO: 3785 - DNA, 51 bp, synthetic construct
  misc_feature 1..51: note = Synthetic polynucleotide
  source 1..51: mol_type = other DNA
aaccttgaatggggaaatggcagtgrcacggggccagctgaaaaatggggg

SEQ ID NO: 3786 - DNA, 51 bp, synthetic construct
  misc_feature 1..51: note = Synthetic polynucleotide
  source 1..51: mol_type = other DNA
aggcctgctgaaaatgactgaatatraacttgtggtagttggagctggtgg

SEQ ID NO: 3787 - DNA, 51 bp, synthetic construct
  misc_feature 1..51: note = Synthetic polynucleotide
  source 1..51: mol_type = other DNA
gtgcccatggtgctggtggggaacargtgtgacctggctgcacgcactgtg

SEQ ID NO: 3788 - DNA, 51 bp, synthetic construct
  misc_feature 1..51: note = Synthetic polynucleotide
  source 1..51: mol_type = other DNA
gacctgctgtttaaggactctgcccrcgggtttttaaaagtcccccccagg

SEQ ID NO: 3789 - DNA, 51 bp, synthetic construct
  misc_feature 1..51: note = Synthetic polynucleotide
  source 1..51: mol_type = other DNA
cttttgtttgttccggtcggaaaccraggaccttctgttcagagatgacac

SEQ ID NO: 3790 - DNA, 51 bp, synthetic construct
  misc_feature 1..51: note = Synthetic polynucleotide
  source 1..51: mol_type = other DNA
atgagttcttcattattttagaggtraagaactcagaatttaatacttgaa

SEQ ID NO: 3791 - DNA, 51 bp, synthetic construct
  misc_feature 1..51: note = Synthetic polynucleotide
  source 1..51: mol_type = other DNA
gtgtgtttttttctcgcagagaaccrtggagtctggcagtaccgccgccag

SEQ ID NO: 3792 - DNA, 51 bp, synthetic construct
  misc_feature 1..51: note = Synthetic polynucleotide
  source 1..51: mol_type = other DNA
gcctgcatccggcagaagggcggctrctgcagctggtaccgaggatgggcc

SEQ ID NO: 3793 - DNA, 51 bp, synthetic construct
  misc_feature 1..51: note = Synthetic polynucleotide
  misc_difference 26: note = n is a, c, g, t or u
  source 1..51: mol_type = other DNA
gattacaggtgtgagccaccgcaccnagccaattttgagtatttttaaaag

SEQ ID NO: 3794 - DNA, 51 bp, synthetic construct
  misc_feature 1..51: note = Synthetic polynucleotide
  source 1..51: mol_type = other DNA
taacatgttactctttcttgtttcargtaaaatatgcaatatacrtygtct

SEQ ID NO: 3795 - DNA, 51 bp, synthetic construct
  misc_feature 1..51: note = Synthetic polynucleotide
  source 1..51: mol_type = other DNA
aggttgatgcttttgaagaacgacakaaaagttggggaattgactgtcttt

SEQ ID NO: 3796 - DNA, 51 bp, synthetic construct
  misc_feature 1..51: note = Synthetic polynucleotide
  source 1..51: mol_type = other DNA
tctaccttgacagacctccagccgtrcatgcgacagttcgtggctcacctg

SEQ ID NO: 3797 - DNA, 51 bp, synthetic construct
  misc_feature 1..51: note = Synthetic polynucleotide
  source 1..51: mol_type = other DNA
cttttgccggaggacagagactgacrtggaacaggggaagggcctggctgt

SEQ ID NO: 3798 - DNA, 51 bp, synthetic construct
  misc_feature 1..51: note = Synthetic polynucleotide
  source 1..51: mol_type = other DNA
atctgcaggaatcgtgtgactaatartgtaaaagacgtcactaaattggta

SEQ ID NO: 3799 - DNA, 51 bp, synthetic construct
  misc_feature 1..51: note = Synthetic polynucleotide
  source 1..51: mol_type = other DNA
gcggagctgctaagagcctgctgacrtgacatcggccacagagtttgaaaa

SEQ ID NO: 3800 - DNA, 51 bp, synthetic construct
  misc_feature 1..51: note = Synthetic polynucleotide
  source 1..51: mol_type = other DNA
gagcgggtcgctgagaggggtcagargcttgaggattcctatcacttacaa

SEQ ID NO: 3801 - DNA, 51 bp, synthetic construct
  misc_feature 1..51: note = Synthetic polynucleotide
  source 1..51: mol_type = other DNA
tttacagtaccggagtacactggaarggatgcttgatgtaacaatgctaca

SEQ ID NO: 3802 - DNA, 51 bp, synthetic construct
  misc_feature 1..51: note = Synthetic polynucleotide
  source 1..51: mol_type = other DNA
gacccgagctgggcccgtgtggtcarcctcaatgccctgctcatgatggca

SEQ ID NO: 3803 - DNA, 51 bp, synthetic construct
  misc_feature 1..51: note = Synthetic polynucleotide
  source 1..51: mol_type = other DNA
cacgagctcattcgcaatgcagccgrtatctccatcatcgttatctacttc

SEQ ID NO: 3804 - DNA, 51 bp, synthetic construct
  misc_feature 1..51: note = Synthetic polynucleotide
  source 1..51: mol_type = other DNA
tctctaccaggtgtgcctgaccctgrcagccaagcgcatggcacggaagaa

SEQ ID NO: 3805 - DNA, 51 bp, synthetic construct
  misc_feature 1..51: note = Synthetic polynucleotide
  source 1..51: mol_type = other DNA
cttcccggacagtcctggcctcaacrgaaccgtggttaacatctcgtccct

SEQ ID NO: 3806 - DNA, 51 bp, synthetic construct
  misc_feature 1..51: note = Synthetic polynucleotide
  source 1..51: mol_type = other DNA
ctcaccaacctcatccacaccaagtrcccgcagcttctgccaggtgagcag

SEQ ID NO: 3807 - DNA, 51 bp, synthetic construct
  misc_feature 1..51: note = Synthetic polynucleotide
  source 1..51: mol_type = other DNA
tgcgaggacaccatctttgaaatgcrgctggcggctcagatctcggagtcg

SEQ ID NO: 3808 - DNA, 51 bp, synthetic construct
  misc_feature 1..51: note = Synthetic polynucleotide
  source 1..51: mol_type = other DNA
cagtccttcctgtacctgggctggtrtatggtgatgtccctcttgggacac

SEQ ID NO: 3809 - DNA, 51 bp, synthetic construct
  misc_feature 1..51: note = Synthetic polynucleotide
  source 1..51: mol_type = other DNA
ctctgtctcaaaaaaaaaaaaaaacrtatgtaaagttgttcccaaatgcca

SEQ ID NO: 3810 - DNA, 51 bp, synthetic construct
  misc_feature 1..51: note = Synthetic polynucleotide
  source 1..51: mol_type = other DNA
ggtgtactacttcctggaggaaagcrcaggctacatggaacccgccctgcg

SEQ ID NO: 3811 - DNA, 51 bp, synthetic construct
  misc_feature 1..51: note = Synthetic polynucleotide
  source 1..51: mol_type = other DNA
tctccctacctgcctgtcctcaggtrcatccccgagggcctgcagtgctcg

SEQ ID NO: 3812 - DNA, 51 bp, synthetic construct
  misc_feature 1..51: note = Synthetic polynucleotide
  source 1..51: mol_type = other DNA
ggcctgcagtgctcgtgtggaatcgrctactacacgctcaagccggaggtc

SEQ ID NO: 3813 - DNA, 51 bp, synthetic construct
  misc_feature 1..51: note = Synthetic polynucleotide
  source 1..51: mol_type = other DNA
catgaccatcccagcgttctttgccragagcgccgccatctacaaccctgt

SEQ ID NO: 3814 - DNA, 51 bp, synthetic construct
  misc_feature 1..51: note = Synthetic polynucleotide
  source 1..51: mol_type = other DNA
cctaacttctacgtgcccttctccartgcgacgggtgtggtacgcagcccc

SEQ ID NO: 3815 - DNA, 51 bp, synthetic construct
  misc_feature 1..51: note = Synthetic polynucleotide
  source 1..51: mol_type = other DNA
aagggtgctgtggatcagggaaatgrtgagtatgaagctgttttaaattct

SEQ ID NO: 3816 - DNA, 51 bp, synthetic construct
  misc_feature 1..51: note = Synthetic polynucleotide
  source 1..51: mol_type = other DNA
ctttggacaaaaaggctggcccaaargatcctgccccactggagttttcca

SEQ ID NO: 3817 - DNA, 51 bp, synthetic construct
  misc_feature 1..51: note = Synthetic polynucleotide
  source 1..51: mol_type = other DNA
gagtgcccagaatccctctgccagtrcagtttcaattcacagcgttttgct

SEQ ID NO: 3818 - DNA, 51 bp, synthetic construct
  misc_feature 1..51: note = Synthetic polynucleotide
  source 1..51: mol_type = other DNA
tttgctgacaaagaagaaggtggagrtgtgaagtccgtgtgcatgaccttg

SEQ ID NO: 3819 - DNA, 51 bp, synthetic construct
  misc_feature 1..51: note = Synthetic polynucleotide
  source 1..51: mol_type = other DNA
ataaactcagctgccaagacctactrcatgtctggtggccttcagcctgtg

SEQ ID NO: 3820 - DNA, 51 bp, synthetic construct
  misc_feature 1..51: note = Synthetic polynucleotide
  source 1..51: mol_type = other DNA
gcaaattcttgctgtcagaacatagrtcaaagttttccaggcttccatgga

SEQ ID NO: 3821 - DNA, 51 bp, synthetic construct
  misc_feature 1..51: note = Synthetic polynucleotide
  source 1..51: mol_type = other DNA
actggaacatcatctttacatgtttdtgatggcaagtttctggctcgggtt

SEQ ID NO: 3822 - DNA, 51 bp, synthetic construct
  misc_feature 1..51: note = Synthetic polynucleotide
  source 1..51: mol_type = other DNA
ctgaagcagaagaggcggaccctgaraaaccgcggctatgcccagtcctgc

SEQ ID NO: 3823 - DNA, 51 bp, synthetic construct
  misc_feature 1..51: note = Synthetic polynucleotide
  source 1..51: mol_type = other DNA
tccctcctctacgggcttgtgcaccrgggcatgaaatgctcctgtgagtga

SEQ ID NO: 3824 - DNA, 51 bp, synthetic construct
  misc_feature 1..51: note = Synthetic polynucleotide
  source 1..51: mol_type = other DNA
cttcctcatggttctaggaaaaggcrgttttgggaaggttggattcctggg

SEQ ID NO: 3825 - DNA, 51 bp, synthetic construct
  misc_feature 1..51: note = Synthetic polynucleotide
  source 1..51: mol_type = other DNA
acggacaaagagattgaggttctctrtattcggaatgtaacttttgaggac

SEQ ID NO: 3826 - DNA, 51 bp, synthetic construct
  misc_feature 1..51: note = Synthetic polynucleotide
  source 1..51: mol_type = other DNA
aaggagattacagcttccccagactrcctggagatagccatttactgcata

SEQ ID NO: 3827 - DNA, 51 bp, synthetic construct
  misc_feature 1..51: note = Synthetic polynucleotide
  source 1..51: mol_type = other DNA
tgcccagccccacatccagtggatcragcacgtggaaaagaacggcagtaa

SEQ ID NO: 3828 - DNA, 51 bp, synthetic construct
  misc_feature 1..51: note = Synthetic polynucleotide
  source 1..51: mol_type = other DNA
actgttcatagatgatgccacagagraagacctttctgatctggtgtcaga

SEQ ID NO: 3829 - DNA, 51 bp, synthetic construct
  misc_feature 1..51: note = Synthetic polynucleotide
  source 1..51: mol_type = other DNA
aacatgtgtgctcagctttgtgtcarttaccctggaggttacacttgctat

SEQ ID NO: 3830 - DNA, 51 bp, synthetic construct
  misc_feature 1..51: note = Synthetic polynucleotide
  source 1..51: mol_type = other DNA
aaatggttttgttatgctttcaaatragaaagattgtaaaggtaagagcag

SEQ ID NO: 3831 - DNA, 51 bp, synthetic construct
  misc_feature 1..51: note = Synthetic polynucleotide
  source 1..51: mol_type = other DNA
gcctgtttcagattacatcaatgcaratatcatcatggtaagctttgcttt

SEQ ID NO: 3832 - DNA, 51 bp, synthetic construct
  misc_feature 1..51: note = Synthetic polynucleotide
  source 1..51: mol_type = other DNA
cctgtttcagattacatcaatgcaavtatcatcatggtaagctttgctttt

SEQ ID NO: 3833 - DNA, 51 bp, synthetic construct
  misc_feature 1..51: note = Synthetic polynucleotide
  source 1..51: mol_type = other DNA
caagaaaacaaaaacaaaaatagatvtaaaaacatcctgccctgtaagtat

SEQ ID NO: 3834 - DNA, 51 bp, synthetic construct
  misc_feature 1..51: note = Synthetic polynucleotide
  misc_difference 26: note = n is a, c, g, t or u
  source 1..51: mol_type = other DNA
cacatcaagattcagaacactggtgnttactatgacctgtatggaggggag

SEQ ID NO: 3835 - DNA, 51 bp, synthetic construct
  misc_feature 1..51: note = Synthetic polynucleotide
  source 1..51: mol_type = other DNA
aagattcagaacactggtgattactrtgacctgtatggaggggagaaattt

SEQ ID NO: 3836 - DNA, 51 bp, synthetic construct
  misc_feature 1..51: note = Synthetic polynucleotide
  misc_difference 26: note = n is a, c, g, t or u
  source 1..51: mol_type = other DNA
ggggagaaatttgccactttggctgngttggtccagtattacatggaacat

SEQ ID NO: 3837 - DNA, 51 bp, synthetic construct
  misc_feature 1..51: note = Synthetic polynucleotide
  source 1..51: mol_type = other DNA
tttgccactttggctgagttggtccrgtattacatggaacatcacgggcaa

SEQ ID NO: 3838 - DNA, 51 bp, synthetic construct
  misc_feature 1..51: note = Synthetic polynucleotide
  source 1..51: mol_type = other DNA
tcagggatggtccagacagaagcacvgtaccgatttatctatatggcggtc

SEQ ID NO: 3839 - DNA, 51 bp, synthetic construct
  misc_feature 1..51: note = Synthetic polynucleotide
  source 1..51: mol_type = other DNA
aactctccgtacatcgtgggcttctrtggtgcgttctacagcgatggcgag

SEQ ID NO: 3840 - DNA, 51 bp, synthetic construct
  misc_feature 1..51: note = Synthetic polynucleotide
  source 1..51: mol_type = other DNA
ccagcgctcccgggactactcggccrtgatcaagcacctgagaacgcacaa

SEQ ID NO: 3841 - DNA, 51 bp, synthetic construct
  misc_feature 1..51: note = Synthetic polynucleotide
  source 1..51: mol_type = other DNA
agtggtggggggccttggcggctacrtgctgggaagtgccatgagcaggcc

SEQ ID NO: 3842 - DNA, 51 bp, synthetic construct
  misc_feature 1..51: note = Synthetic polynucleotide
  source 1..51: mol_type = other DNA
gtggttgagcagatgtgtatcacccrgtacgagagggaatctcaggcctat

SEQ ID NO: 3843 - DNA, 51 bp, synthetic construct
  misc_feature 1..51: note = Synthetic polynucleotide
  source 1..51: mol_type = other DNA
ctttgtgcacgactgcgtcaatatcrcaatcaagcagcacacggtcaccac

SEQ ID NO: 3844 - DNA, 51 bp, synthetic construct
  misc_feature 1..51: note = Synthetic polynucleotide
  source 1..51: mol_type = other DNA
tgcgtcaatatcacaatcaagcagcrcacggtcaccacaaccaccaagggg

SEQ ID NO: 3845 - DNA, 51 bp, synthetic construct
  misc_feature 1..51: note = Synthetic polynucleotide
  source 1..51: mol_type = other DNA
accattgccgccctgctgagcccctrctcctattccaccacggctgtcgtc

SEQ ID NO: 3846 - DNA, 51 bp, synthetic construct
  misc_feature 1..51: note = Synthetic polynucleotide
  source 1..51: mol_type = other DNA
gtctggagagctgcatgggctcacarctgaggaggaatttgtagaagggat

SEQ ID NO: 3847 - DNA, 51 bp, synthetic construct
  misc_feature 1..51: note = Synthetic polynucleotide
  source 1..51: mol_type = other DNA
agaaaggctgctgatgacacctgggrgccatttgcctctgggtaagttgcc

SEQ ID NO: 3848 - DNA, 51 bp, synthetic construct
  misc_feature 1..51: note = Synthetic polynucleotide
  source 1..51: mol_type = other DNA
ccagactttcacaccttataggaaarccagtgagtctggagagctgcatgg

SEQ ID NO: 3849 - DNA, 51 bp, synthetic construct
  misc_feature 1..51: note = Synthetic polynucleotide
  source 1..51: mol_type = other DNA
cgactccggcccccgccgctacaccrttgccgccctgctgagcccctactc

SEQ ID NO: 3850 - DNA, 51 bp, synthetic construct
  misc_feature 1..51: note = Synthetic polynucleotide
  source 1..51: mol_type = other DNA
tgtcctctgatggtcaaagttctagrtgctgtccgaggcagtcctgccatc

SEQ ID NO: 3851 - DNA, 51 bp, synthetic construct
  misc_feature 1..51: note = Synthetic polynucleotide
  source 1..51: mol_type = other DNA
cacagaccccttcttcatcgtggaarcgctgtgtatcatctggttctcctt

SEQ ID NO: 3852 - DNA, 51 bp, synthetic construct
  misc_feature 1..51: note = Synthetic polynucleotide
  source 1..51: mol_type = other DNA
gacggacttcttcaaaaacatcatgracttcatagacattgtggccatcat

SEQ ID NO: 3853 - DNA, 51 bp, synthetic construct
  misc_feature 1..51: note = Synthetic polynucleotide
  source 1..51: mol_type = other DNA
aaaatcttcaactacggccgcatctrtggtgctgggcagccctttgctgag

SEQ ID NO: 3854 - DNA, 51 bp, synthetic construct
  misc_feature 1..51: note = Synthetic polynucleotide
  source 1..51: mol_type = other DNA
gagcccacatggctcaccgccagcartgcccgggtatgtgacctctgtacc

SEQ ID NO: 3855 - DNA, 51 bp, synthetic construct
  misc_feature 1..51: note = Synthetic polynucleotide
  source 1..51: mol_type = other DNA
acccgccaccttctgctggccaacarcagccttcagtccgtgcccccggga

SEQ ID NO: 3856 - DNA, 51 bp, synthetic construct
  misc_feature 1..51: note = Synthetic polynucleotide
  source 1..51: mol_type = other DNA
ctggaaaccatggggctgtgggtggrctgcaggggccacggactcacggcc

SEQ ID NO: 3857 - DNA, 51 bp, synthetic construct
  misc_feature 1..51: note = Synthetic polynucleotide
  source 1..51: mol_type = other DNA
cctggtcatttatagaaaccgaggtrtgaaattcgctggagggtcattgaa

SEQ ID NO: 3858 - DNA, 51 bp, synthetic construct
  misc_feature 1..51: note = Synthetic polynucleotide
  source 1..51: mol_type = other DNA
gggggcttcactgttcagtgtcactragaagcagctgggagcaggaagtat

SEQ ID NO: 3859 - DNA, 51 bp, synthetic construct
  misc_feature 1..51: note = Synthetic polynucleotide
  source 1..51: mol_type = other DNA
gtttcatgagttatctctctcacccrggcgaattgatgatgacaagggaag

SEQ ID NO: 3860 - DNA, 51 bp, synthetic construct
  misc_feature 1..51: note = Synthetic polynucleotide
  source 1..51: mol_type = other DNA
acacacgccatgctgccctatgaccrgtacctgcaccgctttgctgcgtac

SEQ ID NO: 3861 - DNA, 51 bp, synthetic construct
  misc_feature 1..51: note = Synthetic polynucleotide
  source 1..51: mol_type = other DNA
caaagccattggtgggatcattctgrcagccagtcacaacccagggggccc

SEQ ID NO: 3862 - DNA, 51 bp, synthetic construct
  misc_feature 1..51: note = Synthetic polynucleotide
  source 1..51: mol_type = other DNA
ttcatgaaacaaatgaatgatgcacdtcatggtggctggacaacaaaaatg

SEQ ID NO: 3863 - DNA, 51 bp, synthetic construct
  misc_feature 1..51: note = Synthetic polynucleotide
  source 1..51: mol_type = other DNA
cgagatcctctctctgaaatcactgvgcaggagaaagattttctatggagt

SEQ ID NO: 3864 - DNA, 51 bp, synthetic construct
  misc_feature 1..51: note = Synthetic polynucleotide
  source 1..51: mol_type = other DNA
cccttcactgccatcctgtatggcartgggcctggctacaaggtggtgggc

SEQ ID NO: 3865 - DNA, 51 bp, synthetic construct
  misc_feature 1..51: note = Synthetic polynucleotide
  source 1..51: mol_type = other DNA
agaaataaacaggtataagatgtgarttcagtcctcaaataaacctactat

SEQ ID NO: 3866 - DNA, 51 bp, synthetic construct
  misc_feature 1..51: note = Synthetic polynucleotide
  source 1..51: mol_type = other DNA
ttctatatgaaagtgtgacattaacratgtacctactctgttagccgcgya

SEQ ID NO: 3867 - DNA, 51 bp, synthetic construct
  misc_feature 1..51: note = Synthetic polynucleotide
  source 1..51: mol_type = other DNA
tttcctgtcgtagaatagcatgaaaraacttctgcctaattttcctgatct

SEQ ID NO: 3868 - DNA, 51 bp, synthetic construct
  misc_feature 1..51: note = Synthetic polynucleotide
  source 1..51: mol_type = other DNA
ctggccctggaagggctcacggacarcgaggtggaggactgcctgactgtc

SEQ ID NO: 3869 - DNA, 51 bp, synthetic construct
  misc_feature 1..51: note = Synthetic polynucleotide
  source 1..51: mol_type = other DNA
ttccttctttttgcaggaggcattgraattttcagcagagaccttccaagg

SEQ ID NO: 3870 - DNA, 51 bp, synthetic construct
  misc_feature 1..51: note = Synthetic polynucleotide
  source 1..51: mol_type = other DNA
ctgcactgcacgcgcaactacatccrcatgcacctgttcctgtccttcatg

SEQ ID NO: 3871 - DNA, 51 bp, synthetic construct
  misc_feature 1..51: note = Synthetic polynucleotide
  source 1..51: mol_type = other DNA
ttccatttttaggccaaatgttacartgaacttaatggatgcaccaagata

SEQ ID NO: 3872 - DNA, 51 bp, synthetic construct
  misc_feature 1..51: note = Synthetic polynucleotide
  source 1..51: mol_type = other DNA
cgtggtgaaacacatccggacctacragcagagagaccccggcatcttcgc

SEQ ID NO: 3873 - DNA, 51 bp, synthetic construct
  misc_feature 1..51: note = Synthetic polynucleotide
  source 1..51: mol_type = other DNA
cgacatctctcgccagctccgcgtcrgccatggctgcgtcagcaagatcct

SEQ ID NO: 3874 - DNA, 51 bp, synthetic construct
  misc_feature 1..51: note = Synthetic polynucleotide
  source 1..51: mol_type = other DNA
gatgggctccacattccaactatgtraaatatgtgctgaaaatgataagga

SEQ ID NO: 3875 - DNA, 51 bp, synthetic construct
  misc_feature 1..51: note = Synthetic polynucleotide
  source 1..51: mol_type = other DNA
ggtctagccagagacatcaagaatgrttctaattatgtggttaaaggaaac

SEQ ID NO: 3876 - DNA, 51 bp, synthetic construct
  misc_feature 1..51: note = Synthetic polynucleotide
  source 1..51: mol_type = other DNA
gtgtattcacagagacttggcagccrgaaatatcctccttactcatggtcg

SEQ ID NO: 3877 - DNA, 51 bp, synthetic construct
  misc_feature 1..51: note = Synthetic polynucleotide
  source 1..51: mol_type = other DNA
acgggaagccctcatgtctgaactcraagtcctgagttaccttggtaatca

SEQ ID NO: 3878 - DNA, 51 bp, synthetic construct
  misc_feature 1..51: note = Synthetic polynucleotide
  source 1..51: mol_type = other DNA
cggaacgtgctggtcaagagtcccarccatgtcaaaattacagacttcggg

SEQ ID NO: 3879 - DNA, 51 bp, synthetic construct
  misc_feature 1..51: note = Synthetic polynucleotide
  source 1..51: mol_type = other DNA
gattttggtcttgccagagacatgtrtgataaagaatactatagtgtacac

SEQ ID NO: 3880 - DNA, 51 bp, synthetic construct
  misc_feature 1..51: note = Synthetic polynucleotide
  source 1..51: mol_type = other DNA
acagggcattttggttgtgtatatcvtgggactttgttggacaatgatggc

SEQ ID NO: 3881 - DNA, 51 bp, synthetic construct
  misc_feature 1..51: note = Synthetic polynucleotide
  source 1..51: mol_type = other DNA
agtgtacacaacaaaacaggtgcaargctgccagtgaagtggatggctttg

SEQ ID NO: 3882 - DNA, 51 bp, synthetic construct
  misc_feature 1..51: note = Synthetic polynucleotide
  misc_difference 26: note = n is a, c, g, t or u
  source 1..51: mol_type = other DNA
ttggacatactggatacagctggacnagaagagtacagtgccatgagagac

SEQ ID NO: 3883 - DNA, 51 bp, synthetic construct
  misc_feature 1..51: note = Synthetic polynucleotide
  source 1..51: mol_type = other DNA
aggtgattttggtctagctacagtgvaatctcgatggagtgggtcccatca

SEQ ID NO: 3884 - DNA, 51 bp, synthetic construct
  misc_feature 1..51: note = Synthetic polynucleotide
  source 1..51: mol_type = other DNA
gaagacctcacagtaaaaataggtgdttttggtctagctacagtgaaatct

SEQ ID NO: 3885 - DNA, 51 bp, synthetic construct
  misc_feature 1..51: note = Synthetic polynucleotide
  source 1..51: mol_type = other DNA
gacttttgtcgaaagctgcttttccrgggtttccgctgtcaaacatgtggt

SEQ ID NO: 3886 - DNA, 51 bp, synthetic construct
  misc_feature 1..51: note = Synthetic polynucleotide
  source 1..51: mol_type = other DNA
tacacctcagcagttacaagccttcraaaatgaagtaggagtactcaggtg

SEQ ID NO: 3887 - DNA, 51 bp, synthetic construct
  misc_feature 1..51: note = Synthetic polynucleotide
  misc_difference 26: note = n is a, c, g, t or u
  source 1..51: mol_type = other DNA
cagcagttacaagccttcaaaaatgnagtaggagtactcaggtgagcttgt

SEQ ID NO: 3888 - DNA, 51 bp, synthetic construct
  misc_feature 1..51: note = Synthetic polynucleotide
  source 1..51: mol_type = other DNA
catccacagagacctcaagagtaatvgtatccttcctgaaatttgtctgcg

SEQ ID NO: 3889 - DNA, 51 bp, synthetic construct
  misc_feature 1..51: note = Synthetic polynucleotide
  source 1..51: mol_type = other DNA
ctgaaccccaagtttgaggttggagrtatcatgctgatccgtgaccatatc

SEQ ID NO: 3890 - DNA, 51 bp, synthetic construct
  misc_feature 1..51: note = Synthetic polynucleotide
  source 1..51: mol_type = other DNA
caacgtgagctacaggaaggcacctrtgtgatggtggcaggccccagcttt

SEQ ID NO: 3891 - DNA, 51 bp, synthetic construct
  misc_feature 1..51: note = Synthetic polynucleotide
  source 1..51: mol_type = other DNA
cgacaaggagggcaatggcactgtcrtgggtgctgagcttcgccacgtgct

SEQ ID NO: 3892 - DNA, 51 bp, synthetic construct
  misc_feature 1..51: note = Synthetic polynucleotide
  source 1..51: mol_type = other DNA
ctggggctgctggaggaaatgagggrcgagaggctgagccgcatcatcacg

SEQ ID NO: 3893 - DNA, 51 bp, synthetic construct
  misc_feature 1..51: note = Synthetic polynucleotide
  source 1..51: mol_type = other DNA
ctggcagatgctgaggagcgctgtgrtcagctgatcaaaaacaagattcag

SEQ ID NO: 3894 - DNA, 51 bp, synthetic construct
  misc_feature 1..51: note = Synthetic polynucleotide
  source 1..51: mol_type = other DNA
agacaacacttcattggtgttttggrcattgcaggctttgaaatctttgag

SEQ ID NO: 3895 - DNA, 51 bp, synthetic construct
  misc_feature 1..51: note = Synthetic polynucleotide
  source 1..51: mol_type = other DNA
ctacattgacgaggtggggaccttcraagagcgcatccagtgggtagggga

SEQ ID NO: 3896 - DNA, 51 bp, synthetic construct
  misc_feature 1..51: note = Synthetic polynucleotide
  source 1..51: mol_type = other DNA
tcccctcattcctcatagatcttccrctatgccaagggacaaccctacatt

SEQ ID NO: 3897 - DNA, 51 bp, synthetic construct
  misc_feature 1..51: note = Synthetic polynucleotide
  source 1..51: mol_type = other DNA
gaaaagaaagtcttctggaaagtgayagctgtctgcctcccacttctgctc

SEQ ID NO: 3898 - DNA, 51 bp, synthetic construct
  misc_feature 1..51: note = Synthetic polynucleotide
  source 1..51: mol_type = other DNA
tgttcctcccctttccgcctaggggraagtccccggacctcgggcagagag

SEQ ID NO: 3899 - DNA, 51 bp, synthetic construct
  misc_feature 1..51: note = Synthetic polynucleotide
  source 1..51: mol_type = other DNA
tttctcagaaagacagaatccattgrtgtaatggatgcggttggaagtaat

SEQ ID NO: 3900 - DNA, 51 bp, synthetic construct
  misc_feature 1..51: note = Synthetic polynucleotide
  source 1..51: mol_type = other DNA
gacagttaagcgggttgggatcatcrtaagttgtatctgggcagcttgcac

SEQ ID NO: 3901 - DNA, 51 bp, synthetic construct
  misc_feature 1..51: note = Synthetic polynucleotide
  source 1..51: mol_type = other DNA
atattctacatctcttgtcctcagartccatattgtgtgtgcttcatgtct

SEQ ID NO: 3902 - DNA, 51 bp, synthetic construct
  misc_feature 1..51: note = Synthetic polynucleotide
  source 1..51: mol_type = other DNA
ggctgatatgctggtgagcgtttcaratggatcagaaaccattgtcatcac

SEQ ID NO: 3903 - DNA, 51 bp, synthetic construct
  misc_feature 1..51: note = Synthetic polynucleotide
  source 1..51: mol_type = other DNA
ctgggtgtcatcagcttgttggagartatcttagtgattgtggcaatagcc

SEQ ID NO: 3904 - DNA, 51 bp, synthetic construct
  misc_feature 1..51: note = Synthetic polynucleotide
  source 1..51: mol_type = other DNA
aagattccatgctttcatgtgattchgaaattaaaaaaaaaagattcatta

SEQ ID NO: 3905 - DNA, 51 bp, synthetic construct
  misc_feature 1..51: note = Synthetic polynucleotide
  source 1..51: mol_type = other DNA
agcgtgggccaggcaaccacagtggrgatcttcctgacgctccagttcgtg

SEQ ID NO: 3906 - DNA, 51 bp, synthetic construct
  misc_feature 1..51: note = Synthetic polynucleotide
  source 1..51: mol_type = other DNA
aaaatggcaatcctcatcttcaccgrtttcacctgcatggcacctatctct

SEQ ID NO: 3907 - DNA, 51 bp, synthetic construct
  misc_feature 1..51: note = Synthetic polynucleotide
  source 1..51: mol_type = other DNA
ccagaattaatggctaccaataaagrtacaaagattgctaagaaaatggca

SEQ ID NO: 3908 - DNA, 51 bp, synthetic construct
  misc_feature 1..51: note = Synthetic polynucleotide
  source 1..51: mol_type = other DNA
caggcggtcctgccgcccctgcctcrggtggtgtgcacctaccgtgatgtg

SEQ ID NO: 3909 - DNA, 51 bp, synthetic construct
  misc_feature 1..51: note = Synthetic polynucleotide
  source 1..51: mol_type = other DNA
catgttcattgtggacatcctcatcracttccgcaccacctacgtcaatgc

SEQ ID NO: 3910 - DNA, 51 bp, synthetic construct
  misc_feature 1..51: note = Synthetic polynucleotide
  source 1..51: mol_type = other DNA
gctgcctacgcactggcgctgcaacragaccctgcccatcgctttcaaggt

SEQ ID NO: 3911 - DNA, 51 bp, synthetic construct
  misc_feature 1..51: note = Synthetic polynucleotide
  source 1..51: mol_type = other DNA
aacaggctgcagaccatgaaggaggdactggacttccagaagaacatctac

SEQ ID NO: 3912 - DNA, 51 bp, synthetic construct
  misc_feature 1..51: note = Synthetic polynucleotide
  source 1..51: mol_type = other DNA
tgaataccaacaactcctggatattdagatccgactggagaatgaaattca

SEQ ID NO: 3913 - DNA, 51 bp, synthetic construct
  misc_feature 1..51: note = Synthetic polynucleotide
  source 1..51: mol_type = other DNA
ccgccgcgtccgccgcctccggaacyaaacggggtgaggtcacattcggtt

SEQ ID NO: 3914 - DNA, 51 bp, synthetic construct
  misc_feature 1..51: note = Synthetic polynucleotide
  source 1..51: mol_type = other DNA
tgagaaggccaccatgcagaacctcvatgaccgcctggcctcctacctgga

SEQ ID NO: 3915 - DNA, 51 bp, synthetic construct
  misc_feature 1..51: note = Synthetic polynucleotide
  source 1..51: mol_type = other DNA
gagaaggccaccatgcagaacctcartgaccgcctggcctcctacctggac

SEQ ID NO: 3916 - DNA, 51 bp, synthetic construct
  misc_feature 1..51: note = Synthetic polynucleotide
  source 1..51: mol_type = other DNA
gagaaggtgaccatgcagaacctcartgaccgcctggcctcctacctggac

SEQ ID NO: 3917 - DNA, 51 bp, synthetic construct; identical to SEQ ID NO: 3916
  misc_feature 1..51: note = Synthetic polynucleotide
  source 1..51: mol_type = other DNA

SEQ ID NO: 3918 - DNA, 51 bp, synthetic construct
  misc_feature 1..51: note = Synthetic polynucleotide
  source 1..51: mol_type = other DNA
atcgccacttaccgcaagctgctggrgggcgaggaatgcaggtgagtagac

SEQ ID NO: 3919 - DNA, 51 bp, synthetic construct
  misc_feature 1..51: note = Synthetic polynucleotide
  misc_difference 26: note = n is a, c, g, t or u
  source 1..51: mol_type = other DNA
ctgtgtctgcagagcccacacgtgtntccctgagaacaacggaggcgcggg

SEQ ID NO: 3920 - DNA, 51 bp, synthetic construct
  misc_feature 1..51: note = Synthetic polynucleotide
  source 1..51: mol_type = other DNA
ccaggagagaaacgacattgccctgragaccaatggggaccaggcatcctg

SEQ ID NO: 3921 - DNA, 51 bp, synthetic construct
  misc_feature 1..51: note = Synthetic polynucleotide
  source 1..51: mol_type = other DNA
tgcaccgccgaaggcctctgttgccrcagcgagtgcctgggcaactgttct

SEQ ID NO: 3922 - DNA, 51 bp, synthetic construct
  misc_feature 1..51: note = Synthetic polynucleotide
  source 1..51: mol_type = other DNA
agaaacgacattgccctgaagaccartggggaccaggcatcctgtaagtca

SEQ ID NO: 3923 - DNA, 51 bp, synthetic construct
  misc_feature 1..51: note = Synthetic polynucleotide
  source 1..51: mol_type = other DNA
cttctagctcagctgccagattgtcyaaggaaaggagagaatatccagtgg

SEQ ID NO: 3924 - DNA, 51 bp, synthetic construct
  misc_feature 1..51: note = Synthetic polynucleotide
  source 1..51: mol_type = other DNA
tcaggggaaactcttcttccactatraccccaaactctgcttgtcagaaat

SEQ ID NO: 3925 - DNA, 51 bp, synthetic construct
  misc_feature 1..51: note = Synthetic polynucleotide
  source 1..51: mol_type = other DNA
attaaaggactgactgaaggcctgcrtggattccatgttcatgagtttgga

SEQ ID NO: 3926 - DNA, 51 bp, synthetic construct
  misc_feature 1..51: note = Synthetic polynucleotide
  source 1..51: mol_type = other DNA
gatggtgtggccgatgtgtctattgragattctgtgatctcactctcagga

SEQ ID NO: 3927 - DNA, 51 bp, synthetic construct
  misc_feature 1..51: note = Synthetic polynucleotide
  source 1..51: mol_type = other DNA
ctgactgaaggcctgcatggattccrtgttcatgagtttggagataataca

SEQ ID NO: 3928 - DNA, 51 bp, synthetic construct
  misc_feature 1..51: note = Synthetic polynucleotide
  source 1..51: mol_type = other DNA
atctgatgctttttcattattaggcrtgttggagacttgggcaatgtgact

SEQ ID NO: 3929 - DNA, 51 bp, synthetic construct
  misc_feature 1..51: note = Synthetic polynucleotide
  source 1..51: mol_type = other DNA
gcacaggatgaaggactcctttctgrtgtggtacccttcaaagtaccaggt

SEQ ID NO: 3930 - DNA, 51 bp, synthetic construct
  misc_feature 1..51: note = Synthetic polynucleotide
  source 1..51: mol_type = other DNA
gagagacaagtgaccatttggtttcrgaaccgaagagtgaaggacaagaaa

SEQ ID NO: 3931 - DNA, 51 bp, synthetic construct
  misc_feature 1..51: note = Synthetic polynucleotide
  source 1..51: mol_type = other DNA
cgtgtggcgaagatggtcaagtcctrcctgcagcagcacaacatcccacag

SEQ ID NO: 3932 - DNA, 51 bp, synthetic construct
  misc_feature 1..51: note = Synthetic polynucleotide
  source 1..51: mol_type = other DNA
ctggagcagggaggacaggaccagcrtaaaaggcagggcagagtcgactgt

SEQ ID NO: 3933 - DNA, 51 bp, synthetic construct
  misc_feature 1..51: note = Synthetic polynucleotide
  source 1..51: mol_type = other DNA
ccctaaggtgaaggctcatggcaagraagtgctcggtgcctttagtgatgg

SEQ ID NO: 3934 - DNA, 51 bp, synthetic construct
  misc_feature 1..51: note = Synthetic polynucleotide
  source 1..51: mol_type = other DNA
gttactgccctgtggggcaaggtgarcgtggatgaagttggtggtgaggcc

SEQ ID NO: 3935 - DNA, 51 bp, synthetic construct
  misc_feature 1..51: note = Synthetic polynucleotide
  source 1..51: mol_type = other DNA
gggagggcaggagccagggctgggcvtaaaagtcagggcagagccatctat

SEQ ID NO: 3936 - DNA, 51 bp, synthetic construct
  misc_feature 1..51: note = Synthetic polynucleotide
  source 1..51: mol_type = other DNA
gagggcaggagccagggctgggcatraaagtcagggcagagccatctattg

SEQ ID NO: 3937 - DNA, 51 bp, synthetic construct
  misc_feature 1..51: note = Synthetic polynucleotide
  source 1..51: mol_type = other DNA
agggcaggagccagggctgggcatavaagtcagggcagagccatctattgc

SEQ ID NO: 3938 - DNA, 51 bp, synthetic construct
  misc_feature 1..51: note = Synthetic polynucleotide
  source 1..51: mol_type = other DNA
tgagcatctggattctgcctaataaraaacatttattttcattgcaatgat

SEQ ID NO: 3939 - DNA, 51 bp, synthetic construct
  misc_feature 1..51: note = Synthetic polynucleotide
  source 1..51: mol_type = other DNA
ttgagcatctggattctgcctaatadaaaacatttattttcattgcaatga

SEQ ID NO: 3940 - DNA, 51 bp, synthetic construct
  misc_feature 1..51: note = Synthetic polynucleotide
  source 1..51: mol_type = other DNA
cttgagcatctggattctgcctaatraaaaacatttattttcattgcaatg

SEQ ID NO: 3941 - DNA, 51 bp, synthetic construct
  misc_feature 1..51: note = Synthetic polynucleotide
  misc_difference 26: note = n is a, c, g, t or u
  source 1..51: mol_type = other DNA
gtgaacgtggatgaagttggtggtgnggccctgggcaggttggtatcaagg

SEQ ID NO: 3942 - DNA, 51 bp, synthetic construct
  misc_feature 1..51: note = Synthetic polynucleotide
  source 1..51: mol_type = other DNA
tggcctggctcacctggacaacctcvagggcacctttgccacactgagtga

SEQ ID NO: 3943 - DNA, 51 bp, synthetic construct
  misc_feature 1..51: note = Synthetic polynucleotide
  source 1..51: mol_type = other DNA
cccacagactcagagagaacccaccrtggtgctgtctcctgccgacaagac

SEQ ID NO: 3944 - DNA, 51 bp, synthetic construct
  misc_feature 1..51: note = Synthetic polynucleotide
  source 1..51: mol_type = other DNA
caccggcccttcctggtctttgaatraagtctgagtgggcagcagcctgtg

SEQ ID NO: 3945 - DNA, 51 bp, synthetic construct
  misc_feature 1..51: note = Synthetic polynucleotide
  source 1..51: mol_type = other DNA
cacccctcactctgcttctccccgcrggatgttcctgtccttccccaccac

SEQ ID NO: 3946 - DNA, 51 bp, synthetic construct
  misc_feature 1..51: note = Synthetic polynucleotide
  source 1..51: mol_type = other DNA
gccctggatctggagattgccacctrcaggaccctcctggagggagaagaa

SEQ ID NO: 3947 - DNA, 51 bp, synthetic construct
  misc_feature 1..51: note = Synthetic polynucleotide
  source 1..51: mol_type = other DNA
gcgccccgccgccgccgccgccgccrtgggctgcctcgggaacagtaagac

SEQ ID NO: 3948 - DNA, 51 bp, synthetic construct
  misc_feature 1..51: note = Synthetic polynucleotide
  source 1..51: mol_type = other DNA
accagcatgtttgacgtgggtggccdgcgcgatgaacgccgcaagtggatc

SEQ ID NO: 3949 - DNA, 51 bp, synthetic construct
  misc_feature 1..51: note = Synthetic polynucleotide
  source 1..51: mol_type = other DNA
ggcgcctctgacagcaacgtctatgrcctcctaaaggacctagaggaaggc

SEQ ID NO: 3950 - DNA, 51 bp, synthetic construct
  misc_feature 1..51: note = Synthetic polynucleotide
  source 1..51: mol_type = other DNA
ttgtctttcctgcaggcgtctctccragtcgacacttttcctgatcccact

SEQ ID NO: 3951 - DNA, 51 bp, synthetic construct
  misc_feature 1..51: note = Synthetic polynucleotide
  source 1..51: mol_type = other DNA
gaccaatgaaaatattcagcgatttraaatatgtccaacgccaaacaatca

SEQ ID NO: 3952 - DNA, 51 bp, synthetic construct
  misc_feature 1..51: note = Synthetic polynucleotide
  source 1..51: mol_type = other DNA
caatgaaaatattcagcgatttaaartatgtccaacgccaaacaatcagtt

SEQ ID NO: 3953 - DNA, 51 bp, synthetic construct
  misc_feature 1..51: note = Synthetic polynucleotide
  source 1..51: mol_type = other DNA
gatgggatgtggaacattacagtccratggtatgctggagagttactctgc

SEQ ID NO: 3954 - DNA, 51 bp, synthetic construct
  misc_feature 1..51: note = Synthetic polynucleotide
  source 1..51: mol_type = other DNA
tttactgtctgctggactccctactrtgtcctaggaatttggtattggttt

SEQ ID NO: 3955 - DNA, 51 bp, synthetic construct
  misc_feature 1..51: note = Synthetic polynucleotide
  source 1..51: mol_type = other DNA
gccggccgccccgagcgtgcgccctdccgcgacctgcgttgcgtggcgccc

SEQ ID NO: 3956 - DNA, 51 bp, synthetic construct
  misc_feature 1..51: note = Synthetic polynucleotide
  source 1..51: mol_type = other DNA
tttgaagttgcttgggaagtgaccartaaaggtttgtactgctcctgaagg

SEQ ID NO: 3957 - DNA, 51 bp, synthetic construct
  misc_feature 1..51: note = Synthetic polynucleotide
  source 1..51: mol_type = other DNA
cctccacccccactctaggtgtcctvtgtgaaagccattgacatttggatg

SEQ ID NO: 3958 - DNA, 51 bp, synthetic construct
  misc_feature 1..51: note = Synthetic polynucleotide
  source 1..51: mol_type = other DNA
ctccggctctcgagcatctctgcccraggtaagtcccattgcccaagagca

SEQ ID NO: 3959 - DNA, 51 bp, synthetic construct
  misc_feature 1..51: note = Synthetic polynucleotide
  source 1..51: mol_type = other DNA
ccccatggacttgaagaatttccccrtggatgtccagacatgtatcatgca

SEQ ID NO: 3960 - DNA, 51 bp, synthetic construct
  misc_feature 1..51: note = Synthetic polynucleotide
  source 1..51: mol_type = other DNA
acggtggccacgatgatctcctgctrctacgaagaccatcagtgcgaggtc

SEQ ID NO: 3961 - DNA, 51 bp, synthetic construct
  misc_feature 1..51: note = Synthetic polynucleotide
  source 1..51: mol_type = other DNA
aggctgtgatgctgctggctttttcrctgtctttgccagtgagctgtcagt

SEQ ID NO: 3962 - DNA, 51 bp, synthetic construct
  misc_feature 1..51: note = Synthetic polynucleotide
  source 1..51: mol_type = other DNA
cgcctccccgcaccccagtgcatccrcagagacctggctgctcggaacatt

SEQ ID NO: 3963 - DNA, 51 bp, synthetic construct
  misc_feature 1..51: note = Synthetic polynucleotide
  source 1..51: mol_type = other DNA
ccggcagtgatgacctcgcccctgtrcctggagatcatcatctattgcaca

SEQ ID NO: 3964 - DNA, 51 bp, synthetic construct
  misc_feature 1..51: note = Synthetic polynucleotide
  source 1..51: mol_type = other DNA
agcatttacaaatcagtcttttccarctcttccaaagagatgatgtgtttc

SEQ ID NO: 3965 - DNA, 51 bp, synthetic construct
  misc_feature 1..51: note = Synthetic polynucleotide
  source 1..51: mol_type = other DNA
aagcctaacgtgaaggaattcacagrgacctcggccatttttgaggatggg

SEQ ID NO: 3966 - DNA, 51 bp, synthetic construct
  misc_feature 1..51: note = Synthetic polynucleotide
  source 1..51: mol_type = other DNA
accgggctgtcccctggggtcacctrttacttcaaagtctttgcagtgagc

SEQ ID NO: 3967 - DNA, 51 bp, synthetic construct
  misc_feature 1..51: note = Synthetic polynucleotide
  source 1..51: mol_type = other DNA
cgtgcacaacctcgactactacaagvagacaaccaacgtgagcccggccct

SEQ ID NO: 3968 - DNA, 51 bp, synthetic construct
  misc_feature 1..51: note = Synthetic polynucleotide
  source 1..51: mol_type = other DNA
gaggctgacgaggcgggcagtgtgtrtgcaggcatcctcagctacggggtg

SEQ ID NO: 3969 - DNA, 51 bp, synthetic construct
  misc_feature 1..51: note = Synthetic polynucleotide
  source 1..51: mol_type = other DNA
gtgcaggcgcccagcaggttgatgaygtttttgtgtttcccgatcatcttc

SEQ ID NO: 3970 - DNA, 51 bp, synthetic construct
  misc_feature 1..51: note = Synthetic polynucleotide
  source 1..51: mol_type = other DNA
gccctgcgtgcaggcgcccagcaggbtgatgatgtttttgtgtttcccgat

SEQ ID NO: 3971 - DNA, 51 bp, synthetic construct
  misc_feature 1..51: note = Synthetic polynucleotide
  source 1..51: mol_type = other DNA
gacgtggagttccactgcaaggtgtrcagtgacgcacagccccacatccag

SEQ ID NO: 3972 - DNA, 51 bp, synthetic construct
  misc_feature 1..51: note = Synthetic polynucleotide
  source 1..51: mol_type = other DNA
gtctgtaaacatggacagtgcatcartacagatggttcctatcgctgcgag

SEQ ID NO: 3973 - DNA, 51 bp, synthetic construct
  misc_feature 1..51: note = Synthetic polynucleotide
  source 1..51: mol_type = other DNA
atacccagcctctgcacccacggcargtgcagaaacaccattggcagcttt

SEQ ID NO: 3974 - DNA, 51 bp, synthetic construct
  misc_feature 1..51: note = Synthetic polynucleotide
  source 1..51: mol_type = other DNA
tataaatgtatatgcaattcaggatrtgaagtggattcaactgggaaaaac

SEQ ID NO: 3975 - DNA, 51 bp, synthetic construct
  misc_feature 1..51: note = Synthetic polynucleotide
  source 1..51: mol_type = other DNA
ccgcgggtctgtctcttgcttcaacrgtgtttggacggaacagatccgggg

SEQ ID NO: 3976 - DNA, 51 bp, synthetic construct
  misc_feature 1..51: note = Synthetic polynucleotide
  source 1..51: mol_type = other DNA
ttttcagatgttgacttgagtaaatrtatcaccactattgctggagtcatg

SEQ ID NO: 3977 - DNA, 51 bp, synthetic construct
  misc_feature 1..51: note = Synthetic polynucleotide
  source 1..51: mol_type = other DNA
aggctttgttcgaaagaatggtgtcratgaagccaaaatagatgagatcaa

SEQ ID NO: 3978 - DNA, 51 bp, synthetic construct
  misc_feature 1..51: note = Synthetic polynucleotide
  source 1..51: mol_type = other DNA
tttctaggcttagaagtggaaataarctgcacccggacccagaataccaag

SEQ ID NO: 3979 - DNA, 51 bp, synthetic construct
  misc_feature 1..51: note = Synthetic polynucleotide
  source 1..51: mol_type = other DNA
ctcgttggatcctgggacaatatctrtgcctatggcgtccccccatcggcc

SEQ ID NO: 3980 - DNA, 51 bp, synthetic construct
  misc_feature 1..51: note = Synthetic polynucleotide
  source 1..51: mol_type = other DNA
ggcttatccgatggcccctactccarcccttatgagaacagccttatccca

SEQ ID NO: 3981 - DNA, 51 bp, synthetic construct
  misc_feature 1..51: note = Synthetic polynucleotide
  source 1..51: mol_type = other DNA
gacaaggagtgtgtctactattgccrcctggacatcatttggatcaacact

SEQ ID NO: 3982 - DNA, 51 bp, synthetic construct
  misc_feature 1..51: note = Synthetic polynucleotide
  source 1..51: mol_type = other DNA
cagagcggacagcccctccacgagtytcttactgagaatggaggctttggg

SEQ ID NO: 3983 - DNA, 51 bp, synthetic construct
  misc_feature 1..51: note = Synthetic polynucleotide
  source 1..51: mol_type = other DNA
gtagagtttgacttcctcgggaaggrctccatcagatactataacaaggtc

SEQ ID NO: 3984 - DNA, 51 bp, synthetic construct
  misc_feature 1..51: note = Synthetic polynucleotide
  source 1..51: mol_type = other DNA
gttcagattcgtattttggatgtcartgacaatatacctgtagtagaaaat

SEQ ID NO: 3985 - DNA, 51 bp, synthetic construct
  misc_feature 1..51: note = Synthetic polynucleotide
  source 1..51: mol_type = other DNA
tctgtgttcaattttgtgtctgtacrgtggtaccacttttactgctgatgt

SEQ ID NO: 3986 - DNA, 51 bp, synthetic construct
  misc_feature 1..51: note = Synthetic polynucleotide
  source 1..51: mol_type = other DNA
tttctccttattttactctcttcacrgataattgcctttgcaacaactcca

SEQ ID NO: 3987 - DNA, 51 bp, synthetic construct
  misc_feature 1..51: note = Synthetic polynucleotide
  source 1..51: mol_type = other DNA
ccaggatggtctcgatctcctgaccytatgatccgcccgccttggcctccc

SEQ ID NO: 3988 - DNA, 51 bp, synthetic construct
  misc_feature 1..51: note = Synthetic polynucleotide
  source 1..51: mol_type = other DNA
gaggcctggcacgtcccccctcctcrctttcagagcgattaactagtcttg

SEQ ID NO: 3989 - DNA, 51 bp, synthetic construct
  misc_feature 1..51: note = Synthetic polynucleotide
  source 1..51: mol_type = other DNA
cgccgctcggatgaggactacctgtrccgggaggagctggcgcagttccac

SEQ ID NO: 3990 - DNA, 51 bp, synthetic construct
  misc_feature 1..51: note = Synthetic polynucleotide
  source 1..51: mol_type = other DNA
ctaacagtttcatgatcaacatgggrgactcccacgtggacaccagctcca

SEQ ID NO: 3991 - DNA, 51 bp, synthetic construct
  misc_feature 1..51: note = Synthetic polynucleotide
  source 1..51: mol_type = other DNA
tggtttcatctccagggagttccacrggaaataccggatcccagctgatgt

SEQ ID NO: 3992 - DNA, 51 bp, synthetic construct
  misc_feature 1..51: note = Synthetic polynucleotide
  source 1..51: mol_type = other DNA
aacacccagcagccgggctgcgagarcgtctgctacgacagggccttcccc

SEQ ID NO: 3993 - DNA, 51 bp, synthetic construct
  misc_feature 1..51: note = Synthetic polynucleotide
  source 1..51: mol_type = other DNA
tacgatcactacttccccatctcccrcatccggctatgggccctgcagctg

SEQ ID NO: 3994 - DNA, 51 bp, synthetic construct
  misc_feature 1..51: note = Synthetic polynucleotide
  source 1..51: mol_type = other DNA
cgtctaccccctcacccaatctaccytgatgggatatggaatcccaggctt

SEQ ID NO: 3995 - DNA, 51 bp, synthetic construct
  misc_feature 1..51: note = Synthetic polynucleotide
  source 1..51: mol_type = other DNA
ctcaaaagcagcgtggacgcggtcargtactttgggaagggcacctacacc

SEQ ID NO: 3996 - DNA, 51 bp, synthetic construct
  misc_feature 1..51: note = Synthetic polynucleotide
  source 1..51: mol_type = other DNA
ttttcatgagcgtctcttcttttccrgggtgacatccagcagctgctcttt

SEQ ID NO: 3997 - DNA, 51 bp, synthetic construct
  misc_feature 1..51: note = Synthetic polynucleotide
  source 1..51: mol_type = other DNA
tataattttttttttttacttctctrgaactttgctgctcagtatgatgga

SEQ ID NO: 3998 - DNA, 51 bp, synthetic construct
  misc_feature 1..51: note = Synthetic polynucleotide
  source 1..51: mol_type = other DNA
gagtgggtacattctgaaaagtaatrtaagtgtctcaattcactttctagt

SEQ ID NO: 3999 - DNA, 51 bp, synthetic construct
  misc_feature 1..51: note = Synthetic polynucleotide
  source 1..51: mol_type = other DNA
acggaaggctcccagaacatcacctrccactgcaagaacagcattgcctat

SEQ ID NO: 4000 - DNA, 51 bp, synthetic construct
  misc_feature 1..51: note = Synthetic polynucleotide
  source 1..51: mol_type = other DNA
cggtctgcctgggcaacgtggtgagrgaggattccctggcttgcctggccc

SEQ ID NO: 4001 - DNA, 51 bp, synthetic construct
  misc_feature 1..51: note = Synthetic polynucleotide
  source 1..51: mol_type = other DNA
tttacttgtcagataccaggaatatrctatttttcataccacgtgcatgtg

SEQ ID NO: 4002 - DNA, 51 bp, synthetic construct
  misc_feature 1..51: note = Synthetic polynucleotide
  source 1..51: mol_type = other DNA
gtattgtgaaaactctgtttttttcdggtcgaatgagtgatttgagtgtaa

SEQ ID NO: 4003 - DNA, 51 bp, synthetic construct
  misc_feature 1..51: note = Synthetic polynucleotide
  source 1..51: mol_type = other DNA
cgtcagcgagctccccgccccccggvggctgcggtggaaatgctccccgga

SEQ ID NO: 4004 - DNA, 51 bp, synthetic construct
  misc_feature 1..51: note = Synthetic polynucleotide
  source 1..51: mol_type = other DNA
aacagcaaaggcgtgagcctcttcgrcatcatcaaccctgagattatcact

SEQ ID NO: 4005 - DNA, 51 bp, synthetic construct
  misc_feature 1..51: note = Synthetic polynucleotide
  source 1..51: mol_type = other DNA
gtgatttgcttcgaattaacgggtcdgattgctcacatcctgcccatgatg

SEQ ID NO: 4006 - DNA, 51 bp, synthetic construct
  misc_feature 1..51: note = Synthetic polynucleotide
  source 1..51: mol_type = other DNA
ctttctggtgcttctgggactgctgrtggctctggtcagctggagcatgga

SEQ ID NO: 4007 - DNA, 51 bp, synthetic construct
  misc_feature 1..51: note = Synthetic polynucleotide
  source 1..51: mol_type = other DNA
catctcactcgggcttatgccaaagrtgtaaaatttggtgcagatgcccga

SEQ ID NO: 4008 - DNA, 51 bp, synthetic construct
  misc_feature 1..51: note = Synthetic polynucleotide
  misc_difference 26: note = n is a, c, g, t or u
  source 1..51: mol_type = other DNA
cactggcagcaacagtcttacctggnctctggaatccattctggtgccact

SEQ ID NO: 4009 - DNA, 51 bp, synthetic construct
  misc_feature 1..51: note = Synthetic polynucleotide
  misc_difference 26: note = n is a, c, g, t or u
  source 1..51: mol_type = other DNA
ctctggaatccattctggtgccactnccacagctccttctctgagtggtaa

SEQ ID NO: 4010 - DNA, 51 bp, synthetic construct
  misc_feature 1..51: note = Synthetic polynucleotide
  source 1..51: mol_type = other DNA
tttatgtaagaatgatataaccaaarggtatataatttggtaatgatgcta

SEQ ID NO: 4011 - DNA, 51 bp, synthetic construct
  misc_feature 1..51: note = Synthetic polynucleotide
  source 1..51: mol_type = other DNA
gatctttaccggcttcagtctggggrggaggaggaagagcagatccacagc

SEQ ID NO: 4012 - DNA, 51 bp, synthetic construct
  misc_feature 1..51: note = Synthetic polynucleotide
  source 1..51: mol_type = other DNA
caccacatcacacccgggtacccacraggtgaggaccccagcctcctccgt

SEQ ID NO: 4013 - DNA, 51 bp, synthetic construct
  misc_feature 1..51: note = Synthetic polynucleotide
  source 1..51: mol_type = other DNA
gaagacctggcgcatgcacttattcrcgggcatccagatcatctgcctggc

SEQ ID NO: 4014 - DNA, 51 bp, synthetic construct
  misc_feature 1..51: note = Synthetic polynucleotide
  source 1..51: mol_type = other DNA
ttcatccgctacctcatctcgtccarcgtcggggaagttgtctggtaggtc

SEQ ID NO: 4015 - DNA, 51 bp, synthetic construct
  misc_feature 1..51: note = Synthetic polynucleotide
  source 1..51: mol_type = other DNA
ggccacataagcggggcccacatcavccctgccgtgactgtggcctgcctg

SEQ ID NO: 4016 - DNA, 51 bp, synthetic construct
  misc_feature 1..51: note = Synthetic polynucleotide
  source 1..51: mol_type = other DNA
gacaccctcccgccctctcggccgcrgggcgctgatggacgagaccatgaa

SEQ ID NO: 4017 - DNA, 51 bp, synthetic construct
  misc_feature 1..51: note = Synthetic polynucleotide
  source 1..51: mol_type = other DNA
cgcctcccacctgcgcaagctgcgtvagcggctcctccgcgatgccgatga

SEQ ID NO: 4018 - DNA, 51 bp, synthetic construct
  misc_feature 1..51: note = Synthetic polynucleotide
  source 1..51: mol_type = other DNA
ttgggattacctgcgctgggtgcagrcactgtctgagcaggtgcaggagga

SEQ ID NO: 4019 - DNA, 51 bp, synthetic construct
  misc_feature 1..51: note = Synthetic polynucleotide
  source 1..51: mol_type = other DNA
ggatttggaccctgaggtcagaccarcttcagccgtggctgcctgagacct

SEQ ID NO: 4020 - DNA, 51 bp, synthetic construct
  misc_feature 1..51: note = Synthetic polynucleotide
  source 1..51: mol_type = other DNA
cctgaaagactactggagcaccgttraggacaagttctctgagttctggga

SEQ ID NO: 4021 - DNA, 51 bp, synthetic construct
  misc_feature 1..51: note = Synthetic polynucleotide
  source 1..51: mol_type = other DNA
gtcgctgctgggcggagtgctccggvggtgaggcccggcacggccccgccc

SEQ ID NO: 4022 - DNA, 51 bp, synthetic construct
  misc_feature 1..51: note = Synthetic polynucleotide
  source 1..51: mol_type = other DNA
tgcagagcaatccagagcggccatcracaaatgggtgtccaataagaccga

SEQ ID NO: 4023 - DNA, 51 bp, synthetic construct
  misc_feature 1..51: note = Synthetic polynucleotide
  source 1..51: mol_type = other DNA
tacagacacccagaacatcttcttcrtgagcaaagtcaccaatcccaagca

SEQ ID NO: 4024 - DNA, 51 bp, synthetic construct
  misc_feature 1..51: note = Synthetic polynucleotide
  source 1..51: mol_type = other DNA
tgcatggcatcttggggcggaaaggratcagagtcagatcaagaacaggag

SEQ ID NO: 4025 - DNA, 51 bp, synthetic construct
  misc_feature 1..51: note = Synthetic polynucleotide
  source 1..51: mol_type = other DNA
cttcctgacccagcactatgatgccraaccacagggccgggatgacagata

SEQ ID NO: 4026 - DNA, 51 bp, synthetic construct
  misc_feature 1..51: note = Synthetic polynucleotide
  source 1..51: mol_type = other DNA
accctgcaaagacatcaacacatttrttcatggcaacaagcgcagcatcaa

SEQ ID NO: 4027 - DNA, 51 bp, synthetic construct
  misc_feature 1..51: note = Synthetic polynucleotide
  source 1..51: mol_type = other DNA
gggcggtgttgtcatagcgacagtgrtcgtcatcaccttggtgatgctgaa

SEQ ID NO: 4028 - DNA, 51 bp, synthetic construct
  misc_feature 1..51: note = Synthetic polynucleotide
  source 1..51: mol_type = other DNA
tttgttttcaaggtgttctttgcagragatgtgggttcaaacaaaggtgca

SEQ ID NO: 4029 - DNA, 51 bp, synthetic construct
  misc_feature 1..51: note = Synthetic polynucleotide
  source 1..51: mol_type = other DNA
catggtgggcggtgttgtcatagcgrcagtgatcgtcatcaccttggtgat

SEQ ID NO: 4030 - DNA, 51 bp, synthetic construct
  misc_feature 1..51: note = Synthetic polynucleotide
  source 1..51: mol_type = other DNA
aaatgctttcttttctaggtcatccrtgcctggcttattatatcatctcta

SEQ ID NO: 4031 - DNA, 51 bp, synthetic construct
  misc_feature 1..51: note = Synthetic polynucleotide
  source 1..51: mol_type = other DNA
gcactcaattctgaatgctgccatcrtgatcagtgtcattgttgtcatgac

SEQ ID NO: 4032 - DNA, 51 bp, synthetic construct
  misc_feature 1..51: note = Synthetic polynucleotide
  misc_difference 26: note = n is a, c, g, t or u
  source 1..51: mol_type = other DNA
catcatgatcagtgtcattgttgtcntgactatcctcctggtggttctgta

SEQ ID NO: 4033 - DNA, 51 bp, synthetic construct
  misc_feature 1..51: note = Synthetic polynucleotide
  source 1..51: mol_type = other DNA
gttgaaacagctcaggagagaaatgvaacgctttttccagctctcatttac

SEQ ID NO: 4034 - DNA, 51 bp, synthetic construct
  misc_feature 1..51: note = Synthetic polynucleotide
  source 1..51: mol_type = other DNA
caagacactgttgcagagaatgatgrtggcgggttcagtgaggaatgggaa

SEQ ID NO: 4035 - DNA, 51 bp, synthetic construct
  misc_feature 1..51: note = Synthetic polynucleotide
  source 1..51: mol_type = other DNA
ccccttcctcttctcttagggttggrtgggctgtctgagcgctgtgcccag

SEQ ID NO: 4036 - DNA, 51 bp, synthetic construct
  misc_feature 1..51: note = Synthetic polynucleotide
  source 1..51: mol_type = other DNA
cattttgattggcgattttctttttdgggcagtagctcgcctgagccagag

SEQ ID NO: 4037 - DNA, 51 bp, synthetic construct
  misc_feature 1..51: note = Synthetic polynucleotide
  source 1..51: mol_type = other DNA
aagcagctcttcttagggggtgtggrtcggcataagcagttctggcgctac

SEQ ID NO: 4038 - DNA, 51 bp, synthetic construct
  misc_feature 1..51: note = Synthetic polynucleotide
  source 1..51: mol_type = other DNA
gtggcagtgagagacttcggcggacrtggctcccagcgtgccagcggcaga

SEQ ID NO: 4039 - DNA, 51 bp, synthetic construct
  misc_feature 1..51: note = Synthetic polynucleotide
  source 1..51: mol_type = other DNA
aaccctccaaaagagcccatgaaagrtgacgtatgtaaactcaggacaaaa

SEQ ID NO: 4040 - DNA, 51 bp, synthetic construct
  misc_feature 1..51: note = Synthetic polynucleotide
  source 1..51: mol_type = other DNA
gccacagaacccgtcatcgccttctrtgagaaacgtggcattgtgcgcaag

SEQ ID NO: 4041 - DNA, 51 bp, synthetic construct
  misc_feature 1..51: note = Synthetic polynucleotide
  source 1..51: mol_type = other DNA
gaggcccccctcaatcccaaggccarccgcgagaagatgacccagatcatg

SEQ ID NO: 4042 - DNA, 51 bp, synthetic construct
  misc_feature 1..51: note = Synthetic polynucleotide
  source 1..51: mol_type = other DNA
atgaaccagatagagcccggcgtgcrgtacaactacgtgtacgacgaggat

SEQ ID NO: 4043 - DNA, 51 bp, synthetic construct
  misc_feature 1..51: note = Synthetic polynucleotide
  source 1..51: mol_type = other DNA
cagcaaatgtggattagcaagcaagrgtacgatgaggcaggcccatccatt

SEQ ID NO: 4044 - DNA, 51 bp, synthetic construct
  misc_feature 1..51: note = Synthetic polynucleotide
  source 1..51: mol_type = other DNA
caaccgggagaagatgactcagatcrtgtttgagaccttcaatgtccctgc

SEQ ID NO: 4045 - DNA, 51 bp, synthetic construct
  misc_feature 1..51: note = Synthetic polynucleotide
  source 1..51: mol_type = other DNA
tgattcttctcctctgtacattcagratccatttgaaacttctctcaacat

SEQ ID NO: 4046 - DNA, 51 bp, synthetic construct
  misc_feature 1..51: note = Synthetic polynucleotide
  source 1..51: mol_type = other DNA
ttattgtcacttggatcaaatggctrtaagaagctactaaaagaaagaaag

SEQ ID NO: 4047 - DNA, 51 bp, synthetic construct
  misc_feature 1..51: note = Synthetic polynucleotide
  source 1..51: mol_type = other DNA
gatcttcagcctgtactcgctggtcracgcctttcagtggatccagtacag

SEQ ID NO: 4048 - DNA, 51 bp, synthetic construct
  misc_feature 1..51: note = Synthetic polynucleotide
  source 1..51: mol_type = other DNA
atatctcattatgattagtgccctcdtggccctggtgtttatcaagtacct

SEQ ID NO: 4049 - DNA, 51 bp, synthetic construct
  misc_feature 1..51: note = Synthetic polynucleotide
  source 1..51: mol_type = other DNA
tgctccctctaccagctggagaactrctgcaactagacgcagcccgcaggc

SEQ ID NO: 4050 - DNA, 51 bp, synthetic construct
  misc_feature 1..51: note = Synthetic polynucleotide
  source 1..51: mol_type = other DNA
gaagcaggccttcgacatcaccatcrtgatcctcatctgcctcaacatggt

SEQ ID NO: 4051 - DNA, 51 bp, synthetic construct
  misc_feature 1..51: note = Synthetic polynucleotide
  source 1..51: mol_type = other DNA
cctcatctgcctcaacatggtcaccrtgatggtggagacagacaaccagag

SEQ ID NO: 4052 - DNA, 51 bp, synthetic construct
  misc_feature 1..51: note = Synthetic polynucleotide
  source 1..51: mol_type = other DNA
ttcatacctcttatcttcctcccacvgctcctgggcaacgtgctggtctgt

SEQ ID NO: 4053 - DNA, 51 bp, synthetic construct
  misc_feature 1..51: note = Synthetic polynucleotide
  source 1..51: mol_type = other DNA
gtggcccacaagaacatccgggagcrgggccgcttcctgcaggacgtgttc

SEQ ID NO: 4054 - DNA, 51 bp, synthetic construct
  misc_feature 1..51: note = Synthetic polynucleotide
  source 1..51: mol_type = other DNA
agcccaccgcagggctgagaccctcrtcttcagcaagcatgcggtgatcgc

SEQ ID NO: 4055 - DNA, 51 bp, synthetic construct
  misc_feature 1..51: note = Synthetic polynucleotide
  source 1..51: mol_type = other DNA
ggaaggcgtggtggaaaccacgggcvtcaccacccaggcccgcacctccta

SEQ ID NO: 4056 - DNA, 51 bp, synthetic construct
  misc_feature 1..51: note = Synthetic polynucleotide
  source 1..51: mol_type = other DNA
gaggacggacgttactctgtggactrctccaagtttggcaacaccgtcaaa

SEQ ID NO: 4057 - DNA, 51 bp, synthetic construct
  misc_feature 1..51: note = Synthetic polynucleotide
  source 1..51: mol_type = other DNA
cccatctgtggacccttttctgcccrgcacatccgggcaacgtttgatcct

SEQ ID NO: 4058 - DNA, 51 bp, synthetic construct
  misc_feature 1..51: note = Synthetic polynucleotide
  source 1..51: mol_type = other DNA
atttatttcaggcaagtccaactcarggtccatgcctctggaatgggaaga

SEQ ID NO: 4059 - DNA, 51 bp, synthetic construct
  misc_feature 1..51: note = Synthetic polynucleotide
  source 1..51: mol_type = other DNA
cccggggctgctgctgatggacacgrccttcagggacgcccaccagtcact

SEQ ID NO: 4060 - DNA, 51 bp, synthetic construct
  misc_feature 1..51: note = Synthetic polynucleotide
  source 1..51: mol_type = other DNA
aatgggtttctttttttaccccccarttataggacgctggtcagaaacatt

SEQ ID NO: 4061 - DNA, 51 bp, synthetic construct
  misc_feature 1..51: note = Synthetic polynucleotide
  source 1..51: mol_type = other DNA
attaaatcatcttttcttctcttttrggaattgcttcatgtttggctgttt

SEQ ID NO: 4062 - DNA, 51 bp, synthetic construct
  misc_feature 1..51: note = Synthetic polynucleotide
  source 1..51: mol_type = other DNA
gagagagccaaaaaggccatgggctvccagccactagtgaccatggatgat

SEQ ID NO: 4063 - DNA, 51 bp, synthetic construct
  misc_feature 1..51: note = Synthetic polynucleotide
  source 1..51: mol_type = other DNA
agaggcccaggggcaattcctcttcrttgtaggagaaggtgataagactat

SEQ ID NO: 4064 - DNA, 51 bp, synthetic construct
  misc_feature 1..51: note = Synthetic polynucleotide
  source 1..51: mol_type = other DNA
attcagcatgctcatcatgtgcactrttctgacaaactgcatatttatgac

SEQ ID NO: 4065 - DNA, 51 bp, synthetic construct
  misc_feature 1..51: note = Synthetic polynucleotide
  source 1..51: mol_type = other DNA
ctatgtcatgtacgacggcttctccrtgcagcggctggtgaagtgcaacgc

SEQ ID NO: 4066 - DNA, 51 bp, synthetic construct
  misc_feature 1..51: note = Synthetic polynucleotide
  source 1..51: mol_type = other DNA
gaaccaaagcctgttggcttaaacartaaagagcgtttccgcacggccttc

SEQ ID NO: 4067 - DNA, 51 bp, synthetic construct
  misc_feature 1..51: note = Synthetic polynucleotide
  source 1..51: mol_type = other DNA
agagatgattatgtgttcggccccartggggggtcgagctggatgagggag

SEQ ID NO: 4068 - DNA, 51 bp, synthetic construct
  misc_feature 1..51: note = Synthetic polynucleotide
  source 1..51: mol_type = other DNA
aaagaggagtttgagacctatgcagrtgccctgtggtggggcctggtgagt

SEQ ID NO: 4069 - DNA, 51 bp, synthetic construct
  misc_feature 1..51: note = Synthetic polynucleotide
  source 1..51: mol_type = other DNA
tgtaactctctctttttccccccacrgaaagcggtcctcatgatgttcata

SEQ ID NO: 4070 - DNA, 51 bp, synthetic construct
  misc_feature 1..51: note = Synthetic polynucleotide
  source 1..51: mol_type = other DNA
cagaaccagtcaggcccatcgggtartaaccaaaaccaaggcaacatgcag

SEQ ID NO: 4071 - DNA, 51 bp, synthetic construct
  misc_feature 1..51: note = Synthetic polynucleotide
  source 1..51: mol_type = other DNA
aatgccgaacctaagcacaatagcartagacagttagaaagaagtggaaga

SEQ ID NO: 4072 - DNA, 51 bp, synthetic construct
  misc_feature 1..51: note = Synthetic polynucleotide
  source 1..51: mol_type = other DNA
atatgttgccagcaaaataggggggdaaatgctgctaggatttgggatcct

SEQ ID NO: 4073 - DNA, 51 bp, synthetic construct
  misc_feature 1..51: note = Synthetic polynucleotide
  source 1..51: mol_type = other DNA
agactgtgttcaactcttgtcttccrgctaccactgccacgtgtaccccta

SEQ ID NO: 4074 - DNA, 51 bp, synthetic construct
  misc_feature 1..51: note = Synthetic polynucleotide
  source 1..51: mol_type = other DNA
gttacgaggtacacagagggctatartcagagatcgagcagctttagagaa

SEQ ID NO: 4075 - DNA, 51 bp, synthetic construct
  misc_feature 1..51: note = Synthetic polynucleotide
  source 1..51: mol_type = other DNA
agcaaaattataatattggaatatartatctggaacttatttctttatagg

SEQ ID NO: 4076 - DNA, 51 bp, synthetic construct
  misc_feature 1..51: note = Synthetic polynucleotide
  source 1..51: mol_type = other DNA
attctgaaaaacaccagtgatctgcrtaagattttcaattccctctggaac

SEQ ID NO: 4077 - DNA, 51 bp, synthetic construct
  misc_feature 1..51: note = Synthetic polynucleotide
  source 1..51: mol_type = other DNA
gtcagcctctgggacccttctccacrgccatgcaccgggccttccagacag

SEQ ID NO: 4078 - DNA, 51 bp, synthetic construct
  misc_feature 1..51: note = Synthetic polynucleotide
  source 1..51: mol_type = other DNA
tgctgcccctgcatcctccaccttcrgggccatgagaagttgctgaggaca

SEQ ID NO: 4079 - DNA, 51 bp, synthetic construct
  misc_feature 1..51: note = Synthetic polynucleotide
  source 1..51: mol_type = other DNA
cccggggcgcctcccgccaggcaccrtggtgcagaagtcgcgcaacggcgg

SEQ ID NO: 4080 - DNA, 51 bp, synthetic construct
  misc_feature 1..51: note = Synthetic polynucleotide
  source 1..51: mol_type = other DNA
gtgttttccaccatcaaggagtatgrgaagagctcggagggggccctctac

SEQ ID NO: 4081 - DNA, 51 bp, synthetic construct
  misc_feature 1..51: note = Synthetic polynucleotide
  source 1..51: mol_type = other DNA
cctgcgcttcctgcagattctgcggrtgatccgcatggaccggcggggagg

SEQ ID NO: 4082 - DNA, 51 bp, synthetic construct
  misc_feature 1..51: note = Synthetic polynucleotide
  source 1..51: mol_type = other DNA
cagattctgcggatgatccgcatggrccggcggggaggcacctggaagctg

SEQ ID NO: 4083 - DNA, 51 bp, synthetic construct
  misc_feature 1..51: note = Synthetic polynucleotide
  source 1..51: mol_type = other DNA
gtgtacttggcagagaagggggagarcgaccactttgacacctacgcggat

SEQ ID NO: 4084 - DNA, 51 bp, synthetic construct
  misc_feature 1..51: note = Synthetic polynucleotide
  source 1..51: mol_type = other DNA
atgctttggggtctctgttcccggtrgagtggaccagatcgtggggcgggg

SEQ ID NO: 4085 - DNA, 51 bp, synthetic construct
  misc_feature 1..51: note = Synthetic polynucleotide
  source 1..51: mol_type = other DNA
aaggagctgcgggagccggagaagartgaaactgcgtggagtcagcctggc

SEQ ID NO: 4086 - DNA, 51 bp, synthetic construct
  misc_feature 1..51: note = Synthetic polynucleotide
  source 1..51: mol_type = other DNA
agaacttccattgatggcttcttttrgggtgaaccaggtagtataattatg

SEQ ID NO: 4087 - DNA, 51 bp, synthetic construct
  misc_feature 1..51: note = Synthetic polynucleotide
  source 1..51: mol_type = other DNA
tcattttctttactcactttataacrgggcctacctggtcccactggtata

SEQ ID NO: 4088 - DNA, 51 bp, synthetic construct
  misc_feature 1..51: note = Synthetic polynucleotide
  source 1..51: mol_type = other DNA
attttctcttttgtcttctcttcttrgggccctcctggtccaccaggactt

SEQ ID NO: 4089 - DNA, 51 bp, synthetic construct
  misc_feature 1..51: note = Synthetic polynucleotide
  source 1..51: mol_type = other DNA
gccctatcatttctttgtatcctatrgggtaaaccaggcaaagatggagaa

SEQ ID NO: 4090 - DNA, 51 bp, synthetic construct
  misc_feature 1..51: note = Synthetic polynucleotide
  source 1..51: mol_type = other DNA
ttgctatcctttctttatcttactcrggtgatgagatatgtgaaccaggcc

SEQ ID NO: 4091 - DNA, 51 bp, synthetic construct
  misc_feature 1..51: note = Synthetic polynucleotide
  source 1..51: mol_type = other DNA
ttctttgaacgttttcctttcaatarctgctgtttctccataggtgaccct

SEQ ID NO: 4092 - DNA, 51 bp, synthetic construct
  misc_feature 1..51: note = Synthetic polynucleotide
  source 1..51: mol_type = other DNA
gttaaaaaatgacttatcattttacrggctttcctggaattccaggacctc

SEQ ID NO: 4093 - DNA, 51 bp, synthetic construct
  misc_feature 1..51: note = Synthetic polynucleotide
  source 1..51: mol_type = other DNA
gcttagatgggctccctggaccaaarggtatggaggctgtcactgcatctc

SEQ ID NO: 4094 - DNA, 51 bp, synthetic construct
  misc_feature 1..51: note = Synthetic polynucleotide
  source 1..51: mol_type = other DNA
cagatacatcttttaaaactgcttcrgtacttattaatattgatattgtat

SEQ ID NO: 4095 - DNA, 51 bp, synthetic construct
  misc_feature 1..51: note = Synthetic polynucleotide
  source 1..51: mol_type = other DNA
attcttcaaaggtaccaaaggtgaartgggtatgatgggacctccaggccc

SEQ ID NO: 4096 - DNA, 51 bp, synthetic construct
  misc_feature 1..51: note = Synthetic polynucleotide
  source 1..51: mol_type = other DNA
aggacctttgggaattcctggcaggrgtggtgtacctggtcttaaaggtaa

SEQ ID NO: 4097 - DNA, 51 bp, synthetic construct
  misc_feature 1..51: note = Synthetic polynucleotide
  source 1..51: mol_type = other DNA
atattatatatcacatattttcaacrgggcctcagggtgtggaagggcctc

SEQ ID NO: 4098 - DNA, 51 bp, synthetic construct
  misc_feature 1..51: note = Synthetic polynucleotide
  source 1..51: mol_type = other DNA
aactgggtgtaacctgctgtactcarttttttaggtggtggaggtcatcct

SEQ ID NO: 4099 - DNA, 51 bp, synthetic construct
  misc_feature 1..51: note = Synthetic polynucleotide
  source 1..51: mol_type = other DNA
tcttctaattatactttactttcatrggccaaaagggtgatggaggattac

SEQ ID NO: 4100 - DNA, 51 bp, synthetic construct
  misc_feature 1..51: note = Synthetic polynucleotide
  source 1..51: mol_type = other DNA
gtaacattaatgattttatttattcrgggtaatcctggccggccgggtctc

SEQ ID NO: 4101 - DNA, 51 bp, synthetic construct
  misc_feature 1..51: note = Synthetic polynucleotide
  source 1..51: mol_type = other DNA
ataaaactgtatgtaccttctgtgcdggcatgaaaggacccagtggagtac

SEQ ID NO: 4102 - DNA, 51 bp, synthetic construct
  misc_feature 1..51: note = Synthetic polynucleotide
  source 1..51: mol_type = other DNA
ggatgggattctctgtggattggttrttccttcatgatggtattttacact

SEQ ID NO: 4103 - DNA, 51 bp, synthetic construct
  misc_feature 1..51: note = Synthetic polynucleotide
  source 1..51: mol_type = other DNA
ctgattgtcttatttcttatttcccrgtaaacctcagtcagaaacgctgaa

SEQ ID NO: 4104 - DNA, 51 bp, synthetic construct
  misc_feature 1..51: note = Synthetic polynucleotide
  source 1..51: mol_type = other DNA
tttcatttgttttcccctttaaacarttaagatctctcaggattaacactg

SEQ ID NO: 4105 - DNA, 51 bp, synthetic construct
  misc_feature 1..51: note = Synthetic polynucleotide
  source 1..51: mol_type = other DNA
tattggtgttccattgcttactttgraatggatgttcaggtaggagagaca

SEQ ID NO: 4106 - DNA, 51 bp, synthetic construct
  misc_feature 1..51: note = Synthetic polynucleotide
  source 1..51: mol_type = other DNA
ccactgctaccacaagtttgcccacvagccacccatctcctcagctgagat

SEQ ID NO: 4107 - DNA, 51 bp, synthetic construct
  misc_feature 1..51: note = Synthetic polynucleotide
  source 1..51: mol_type = other DNA
ctgtcagagttcaacgtcctgaagcrggtcaaccacccacatgtcatcaaa

SEQ ID NO: 4108 - DNA, 51 bp, synthetic construct
  misc_feature 1..51: note = Synthetic polynucleotide
  source 1..51: mol_type = other DNA
tattatgtggctgccgtgtatgagcrtccatccatcctgagtctgaaccct

SEQ ID NO: 4109 - DNA, 51 bp, synthetic construct
  misc_feature 1..51: note = Synthetic polynucleotide
  source 1..51: mol_type = other DNA
ctcatgaaccagaaccttgacatctrtgaacagcaagtgatgactgcagcc

SEQ ID NO: 4110 - DNA, 51 bp, synthetic construct
  misc_feature 1..51: note = Synthetic polynucleotide
  source 1..51: mol_type = other DNA
ccagaagatggcattcatggattcarctttacaagaacatccatttatcca

SEQ ID NO: 4111 - DNA, 51 bp, synthetic construct
  misc_feature 1..51: note = Synthetic polynucleotide
  source 1..51: mol_type = other DNA
tggcattcatggattcaactttacargaacatccatttatccatttttgga

SEQ ID NO: 4112 - DNA, 51 bp, synthetic construct
  misc_feature 1..51: note = Synthetic polynucleotide
  source 1..51: mol_type = other DNA
aggggagatatgttcttggtggccartcttgggacaaaggagccttgtcat

SEQ ID NO: 4113 - DNA, 51 bp, synthetic construct
  misc_feature 1..51: note = Synthetic polynucleotide
  source 1..51: mol_type = other DNA
cccaaaagatgggagataccagttcracacaaatgtcgtgttcagcaataa

SEQ ID NO: 4114 - DNA, 51 bp, synthetic construct
  misc_feature 1..51: note = Synthetic polynucleotide
  source 1..51: mol_type = other DNA
ccaaaagatgggagataccagttcarcacaaatgtcgtgttcagcaataat

SEQ ID NO: 4115 - DNA, 51 bp, synthetic construct
  misc_feature 1..51: note = Synthetic polynucleotide
  source 1..51: mol_type = other DNA
cttgttgaccgctaccgtaaacacarcctctactttgaggcagcattcgat

SEQ ID NO: 4116 - DNA, 51 bp, synthetic construct
  misc_feature 1..51: note = Synthetic polynucleotide
  source 1..51: mol_type = other DNA
gaaagcttttgctgttgcctttggcrtcaacgttctggcagctaatgtcca

SEQ ID NO: 4117 - DNA, 51 bp, synthetic construct
  misc_feature 1..51: note = Synthetic polynucleotide
  source 1..51: mol_type = other DNA
tttcactctgagatgatgtatgacartttcaccctggtccctgtctgggga

SEQ ID NO: 4118 - DNA, 51 bp, synthetic construct
  misc_feature 1..51: note = Synthetic polynucleotide
  source 1..51: mol_type = other DNA
aggcccaccttatccaaagagctgtrtgccctgggggtctttgatgggctt

SEQ ID NO: 4119 - DNA, 51 bp, synthetic construct
  misc_feature 1..51: note = Synthetic polynucleotide
  source 1..51: mol_type = other DNA
acggcggctctctatgggcgcttgtrtgagagggactaggaaaagtgtgtg

SEQ ID NO: 4120 - DNA, 51 bp, synthetic construct
  misc_feature 1..51: note = Synthetic polynucleotide
  source 1..51: mol_type = other DNA
ttccagcggatcccccggtggcctcrtgtcgcgcagtggaaccgatcctca

SEQ ID NO: 4121 - DNA, 51 bp, synthetic construct
  misc_feature 1..51: note = Synthetic polynucleotide
  source 1..51: mol_type = other DNA
gtcagaggcggacgccgcagcagcarccttccgggcaaacggtaactgcac

SEQ ID NO: 4122 - DNA, 51 bp, synthetic construct
  misc_feature 1..51: note = Synthetic polynucleotide
  source 1..51: mol_type = other DNA
gtgcttctagcctatccttgtcggtrggtgaatccccagtacgatagcacc

SEQ ID NO: 4123 - DNA, 51 bp, synthetic construct
  misc_feature 1..51: note = Synthetic polynucleotide
  source 1..51: mol_type = other DNA
tacgatagcaccttcctgtttgacarcgacttcccagctctgcagcctgat

SEQ ID NO: 4124 - DNA, 51 bp, synthetic construct
  misc_feature 1..51: note = Synthetic polynucleotide
  source 1..51: mol_type = other DNA
tttgacaacgacttcccagctctgcrgcctgatgcccccagtccaggtaac

SEQ ID NO: 4125 - DNA, 51 bp, synthetic construct
  misc_feature 1..51: note = Synthetic polynucleotide
  source 1..51: mol_type = other DNA
atcttttctcccgtcaccacccagtraggtcatgtgcttccacccctggtc

SEQ ID NO: 4126 - DNA, 51 bp, synthetic construct
  misc_feature 1..51: note = Synthetic polynucleotide
  source 1..51: mol_type = other DNA
ctggtcggatgtaacgctgccactcrtgtcggtccctgagatccgggctgt

SEQ ID NO: 4127 - DNA, 51 bp, synthetic construct
  misc_feature 1..51: note = Synthetic polynucleotide
  source 1..51: mol_type = other DNA
ttcttctctgcttttgccccttgacrggtatgggccagcagtttcctgcca

SEQ ID NO: 4128 - DNA, 51 bp, synthetic construct
  misc_feature 1..51: note = Synthetic polynucleotide
  source 1..51: mol_type = other DNA
ttttgccccttgacaggtatgggccrgcagtttcctgccagatattgccca

SEQ ID NO: 4129 - DNA, 51 bp, synthetic construct
  misc_feature 1..51: note = Synthetic polynucleotide
  source 1..51: mol_type = other DNA
cgtgaggagcgatctcagcaggcctvtaagagtcagcatggagagcccctg

SEQ ID NO: 4130 - DNA, 51 bp, synthetic construct
  misc_feature 1..51: note = Synthetic polynucleotide
  source 1..51: mol_type = other DNA
gtccccttctgggcaacatggccctvccagacactgctgctgcccgtcggc

SEQ ID NO: 4131 - DNA, 51 bp, synthetic construct
  misc_feature 1..51: note = Synthetic polynucleotide
  source 1..51: mol_type = other DNA
cggctacctgagctgacccctgctgrgcgtgatggtcagtctcccaagtag

SEQ ID NO: 4132 - DNA, 51 bp, synthetic construct
  misc_feature 1..51: note = Synthetic polynucleotide
  source 1..51: mol_type = other DNA
aggctgagagtcaggctctgattccrgatctagcctccatcatgaagaagc

SEQ ID NO: 4133 - DNA, 51 bp, synthetic construct
  misc_feature 1..51: note = Synthetic polynucleotide
  source 1..51: mol_type = other DNA
tccatcatgaagaagctcttgaccargtatgacaacctctttgagacgtcc

SEQ ID NO: 4134 - DNA, 51 bp, synthetic construct
  misc_feature 1..51: note = Synthetic polynucleotide
  source 1..51: mol_type = other DNA
cattggcagctgcacgctcattactrccctccgctcctgcgctctgccact

SEQ ID NO: 4135 - DNA, 51 bp, synthetic construct
  misc_feature 1..51: note = Synthetic polynucleotide
  source 1..51: mol_type = other DNA
ctcctgcgctctgccactgtccggarattcatggttggctacgaaatgctt

SEQ ID NO: 4136 - DNA, 51 bp, synthetic construct
  misc_feature 1..51: note = Synthetic polynucleotide
  source 1..51: mol_type = other DNA
gcttgctcaggctcagagggacctcrcccctgagcaggtcaggactcagaa

SEQ ID NO: 4137 - DNA, 51 bp, synthetic construct
  misc_feature 1..51: note = Synthetic polynucleotide
  source 1..51: mol_type = other DNA
gcagaaggacagggagacagcaaccrtcgcctgaccacgccgaccacaggg

SEQ ID NO: 4138 - DNA, 51 bp, synthetic construct
  misc_feature 1..51: note = Synthetic polynucleotide
  source 1..51: mol_type = other DNA
gttgcttgaaaataaagcagttaaaraggcaggtgtaggaattgaaggaga

SEQ ID NO: 4139 - DNA, 51 bp, synthetic construct
  misc_feature 1..51: note = Synthetic polynucleotide
  source 1..51: mol_type = other DNA
cttacccagacacactccatcgcctygtcgattttggaatgtctgggctca

SEQ ID NO: 4140 - DNA, 51 bp, synthetic construct
  misc_feature 1..51: note = Synthetic polynucleotide
  source 1..51: mol_type = other DNA
acagcgggggagagcgagagccaccrcacatcactgctggtgccctggccc

SEQ ID NO: 4141 - DNA, 51 bp, synthetic construct
  misc_feature 1..51: note = Synthetic polynucleotide
  source 1..51: mol_type = other DNA
caaattgcggcacatgtcataagtgrggccagcagtaaaacaacatctggt

SEQ ID NO: 4142 - DNA, 51 bp, synthetic construct
  misc_feature 1..51: note = Synthetic polynucleotide
  source 1..51: mol_type = other DNA
cccacccaggtggccatccagctgartgacactcaccctgcactcgcgatc

SEQ ID NO: 4143 - DNA, 51 bp, synthetic construct
  misc_feature 1..51: note = Synthetic polynucleotide
  source 1..51: mol_type = other DNA
ccccttggggagggctgcttcggccrggtggtcatggcggaggccatcggc

SEQ ID NO: 4144 - DNA, 51 bp, synthetic construct
  misc_feature 1..51: note = Synthetic polynucleotide
  source 1..51: mol_type = other DNA
tgatatcgccgcgctcgtcgtcgacvacggctccggcatgtgcaaggccgg

SEQ ID NO: 4145 - DNA, 51 bp, synthetic construct
  misc_feature 1..51: note = Synthetic polynucleotide
  source 1..51: mol_type = other DNA
tgggggaagagactgaccttcgtggyggaagctcctcacggtgttggcccg

SEQ ID NO: 4146 - DNA, 51 bp, synthetic construct
  misc_feature 1..51: note = Synthetic polynucleotide
  source 1..51: mol_type = other DNA
cagctggcccgacctggtgtccccarggtgatccctacccctaccatgcct

SEQ ID NO: 4147 - DNA, 51 bp, synthetic construct
  misc_feature 1..51: note = Synthetic polynucleotide
  source 1..51: mol_type = other DNA
agaagaagtttgtgctacagaaactrctatgctgacaaccagacctgtgat

SEQ ID NO: 4148 - DNA, 51 bp, synthetic construct
  misc_feature 1..51: note = Synthetic polynucleotide
  source 1..51: mol_type = other DNA
ctagatatgagaagaagtttgtgctrcagaaactactatgctgacaaccag

SEQ ID NO: 4149 - DNA, 51 bp, synthetic construct
  misc_feature 1..51: note = Synthetic polynucleotide
  source 1..51: mol_type = other DNA
agaagtttgtgctacagaaactactrtgctgacaaccagacctgtgatgga

SEQ ID NO: 4150 - DNA, 51 bp, synthetic construct
  misc_feature 1..51: note = Synthetic polynucleotide
  source 1..51: mol_type = other DNA
ttacttaaactaccatgttcctcgarcgagacgagaaatcctggagaccct

SEQ ID NO: 4151 - DNA, 51 bp, synthetic construct
  misc_feature 1..51: note = Synthetic polynucleotide
  source 1..51: mol_type = other DNA
ctggaggctgagtttcatttcacacrcctcattatgaccttcaaggtgcct

SEQ ID NO: 4152 - DNA, 51 bp, synthetic construct
  misc_feature 1..51: note = Synthetic polynucleotide
  source 1..51: mol_type = other DNA
gacttaagggacctgtgtgcgtggcrggtaagaccctcggagctggagcct

SEQ ID NO: 4153 - DNA, 51 bp, synthetic construct
  misc_feature 1..51: note = Synthetic polynucleotide
  source 1..51: mol_type = other DNA
ggggcgccccggcgccgcaagctctrctgcgccacgaagtaccacctccag

SEQ ID NO: 4154 - DNA, 51 bp, synthetic construct
  misc_feature 1..51: note = Synthetic polynucleotide
  source 1..51: mol_type = other DNA
gccatgaacaagaggggacgactctrtgcttcggtgagtccaggctgtcac

SEQ ID NO: 4155 - DNA, 51 bp, synthetic construct
  misc_feature 1..51: note = Synthetic polynucleotide
  source 1..51: mol_type = other DNA
taatcaaaggaacaatatgaattatrctgtgagatgggctccacattccaa

SEQ ID NO: 4156 - DNA, 51 bp, synthetic construct
  misc_feature 1..51: note = Synthetic polynucleotide
  source 1..51: mol_type = other DNA
tgtgaatgccccgaaggctacagatrtaatctcaaatcaaagtcttgtgaa

SEQ ID NO: 4157 - DNA, 51 bp, synthetic construct
  misc_feature 1..51: note = Synthetic polynucleotide
  source 1..51: mol_type = other DNA
taccagaagtattgtgggaaaccttrcacatatgcgtatggacttggcttg

SEQ ID NO: 4158 - DNA, 51 bp, synthetic construct
  misc_feature 1..51: note = Synthetic polynucleotide
  source 1..51: mol_type = other DNA
tgaatcttttcattggtgtcatcatrgataacttcaaccaacagaaaaaga

SEQ ID NO: 4159 - DNA, 51 bp, synthetic construct
  misc_feature 1..51: note = Synthetic polynucleotide
  source 1..51: mol_type = other DNA
gtcagtgaagaagctttctgatgtcrtgatcttgactgtgttctgtctaag

SEQ ID NO: 4160 - DNA, 51 bp, synthetic construct
  misc_feature 1..51: note = Synthetic polynucleotide
  source 1..51: mol_type = other DNA
ttctgccacctctgtacaaaagacarttttacttgtgtgacagatgggctc

SEQ ID NO: 4161 - DNA, 51 bp, synthetic construct
  misc_feature 1..51: note = Synthetic polynucleotide
  source 1..51: mol_type = other DNA
tttgatcaattagatcttgtcacatrtgaagaagtagtaaaactgccagca

SEQ ID NO: 4162 - DNA, 51 bp, synthetic construct
  misc_feature 1..51: note = Synthetic polynucleotide
  source 1..51: mol_type = other DNA
ggtggcagtgtacttttggctgccartgtgaccctgggactctggatggtt

SEQ ID NO: 4163 - DNA, 51 bp, synthetic construct
  misc_feature 1..51: note = Synthetic polynucleotide
  source 1..51: mol_type = other DNA
acgaatgatttcgactcattaaattrtgataatcatatttaccaaatgccc

SEQ ID NO: 4164 - DNA, 51 bp, synthetic construct
  misc_feature 1..51: note = Synthetic polynucleotide
  source 1..51: mol_type = other DNA
gaatttgcaattcaatatgaaaatcrcctcggagctggtaaaaagaggcct

SEQ ID NO: 4165 - DNA, 51 bp, synthetic construct
  misc_feature 1..51: note = Synthetic polynucleotide
  source 1..51: mol_type = other DNA
gtagcttacctcctcaaagcaatacrctgaaaatgtttagacgggctcaca

SEQ ID NO: 4166 - DNA, 51 bp, synthetic construct
  misc_feature 1..51: note = Synthetic polynucleotide
  source 1..51: mol_type = other DNA
ctgattgagatggctggtgactgcaytggtacccatgggactgagtgtggc

SEQ ID NO: 4167 - DNA, 51 bp, synthetic construct
  misc_feature 1..51: note = Synthetic polynucleotide
  source 1..51: mol_type = other DNA
ctcctgactctggatatcttgaaacrtggcaagcgcttccatgccaccgtc

SEQ ID NO: 4168 - DNA, 51 bp, synthetic construct
  misc_feature 1..51: note = Synthetic polynucleotide
  source 1..51: mol_type = other DNA
gaagcgggtggaagatgtccttggcragggctgggagaatcacgtggaggg

SEQ ID NO: 4169 - DNA, 51 bp, synthetic construct
  misc_feature 1..51: note = Synthetic polynucleotide
  source 1..51: mol_type = other DNA
ctaagaataaccaatcaggtaatctrcttgaatccaccaattgaagagtgc

SEQ ID NO: 4170 - DNA, 51 bp, synthetic construct
  misc_feature 1..51: note = Synthetic polynucleotide
  source 1..51: mol_type = other DNA
actgtaggggtgctctgggtttggghagcactgggcactgagccaggagtc

SEQ ID NO: 4171 - DNA, 51 bp, synthetic construct
  misc_feature 1..51: note = Synthetic polynucleotide
  source 1..51: mol_type = other DNA
atgctctcttccttccctccaggctvcttgtacctggccattgagtacgcg

SEQ ID NO: 4172 - DNA, 51 bp, synthetic construct
  misc_feature 1..51: note = Synthetic polynucleotide
  source 1..51: mol_type = other DNA
agatggcagtgtgaagagagaagacrtattctacacttcaaaggtactgtg

SEQ ID NO: 4173 - DNA, 51 bp, synthetic construct
  misc_feature 1..51: note = Synthetic polynucleotide
  source 1..51: mol_type = other DNA
acaagaacagctgttactcaagaagrtgtatttaatgcttgacaataagag

SEQ ID NO: 4174 - DNA, 51 bp, synthetic construct
  misc_feature 1..51: note = Synthetic polynucleotide
  source 1..51: mol_type = other DNA
gagcatgaaatcaagagcctggaagrtttacaagatgaatatgacttcaaa

SEQ ID NO: 4175 - DNA, 51 bp, synthetic construct
  misc_feature 1..51: note = Synthetic polynucleotide
  source 1..51: mol_type = other DNA
gttggaggaattggaacagaaatacrcctacgaacatgaccctatcacaaa

SEQ ID NO: 4176 - DNA, 51 bp, synthetic construct
  misc_feature 1..51: note = Synthetic polynucleotide
  source 1..51: mol_type = other DNA
cctccaggtccccaggcctcttgcartgcggaaagaggggatccaaaccag

SEQ ID NO: 4177 - DNA, 51 bp, synthetic construct
  misc_feature 1..51: note = Synthetic polynucleotide
  source 1..51: mol_type = other DNA
catgtacattgccatcatcctggagracttcagtgtagccacagaggaaag

SEQ ID NO: 4178 - DNA, 51 bp, synthetic construct
  misc_feature 1..51: note = Synthetic polynucleotide
  source 1..51: mol_type = other DNA
tacatctcacggccgcgccgggtggrgctggctgtcatgttgaacttgacc

SEQ ID NO: 4179 - DNA, 51 bp, synthetic construct
  misc_feature 1..51: note = Synthetic polynucleotide
  source 1..51: mol_type = other DNA
cattgggtatggcttccgagtcatcrcagagaagtgtccagaggggattat

SEQ ID NO: 4180 - DNA, 51 bp, synthetic construct
  misc_feature 1..51: note = Synthetic polynucleotide
  source 1..51: mol_type = other DNA
acggtcgagggggcagagaaggaagrtgagggcgtctacacggtcacagtg

SEQ ID NO: 4181 - DNA, 51 bp, synthetic construct
  misc_feature 1..51: note = Synthetic polynucleotide
  source 1..51: mol_type = other DNA
tgttgatgaccttcgtcgcttatgcrtactcaggatgagttttgtgaaagg

SEQ ID NO: 4182 - DNA, 51 bp, synthetic construct
  misc_feature 1..51: note = Synthetic polynucleotide
  source 1..51: mol_type = other DNA
ttgatgaccttcgtcgcttatgcatrctcaggatgagttttgtgaaaggct

SEQ ID NO: 4183 - DNA, 51 bp, synthetic construct
  misc_feature 1..51: note = Synthetic polynucleotide
  source 1..51: mol_type = other DNA
tatcaatttttgactgctttttcacrattgatctctcgaatttgtcattct

SEQ ID NO: 4184 - DNA, 51 bp, synthetic construct
  misc_feature 1..51: note = Synthetic polynucleotide
  source 1..51: mol_type = other DNA
ccccaaccgcccccaggtttggttcragaatcgtcgggccaaatggagaaa

SEQ ID NO: 4185 - DNA, 51 bp, synthetic construct
  misc_feature 1..51: note = Synthetic polynucleotide
  source 1..51: mol_type = other DNA
ctgtgccaactgtcacaccacaactrccaccttatggcgcagaaacgccga

SEQ ID NO: 4186 - DNA, 51 bp, synthetic construct
  misc_feature 1..51: note = Synthetic polynucleotide
  source 1..51: mol_type = other DNA
aaacgccgagggtgaacccgtgtgcvatgcttgtggactctacatgaaact

SEQ ID NO: 4187 - DNA, 51 bp, synthetic construct
  misc_feature 1..51: note = Synthetic polynucleotide
  source 1..51: mol_type = other DNA
cttgtggaagccctgaagccagagtrtgtggcacctcttgtcctttggctt

SEQ ID NO: 4188 - DNA, 51 bp, synthetic construct
  misc_feature 1..51: note = Synthetic polynucleotide
  source 1..51: mol_type = other DNA
gcctgtgacagcaacattaatgcggrgaccatcattggccttgttcgggta

SEQ ID NO: 4189 - DNA, 51 bp, synthetic construct
  misc_feature 1..51: note = Synthetic polynucleotide
  source 1..51: mol_type = other DNA
catcataaaaaccaaacacttctctrtaatctttttgacatttctcagtct

SEQ ID NO: 4190 - DNA, 51 bp, synthetic construct
  misc_feature 1..51: note = Synthetic polynucleotide
  source 1..51: mol_type = other DNA
gctccactaggttggccagcatgccygcgaagaggtagagacccttgagca

SEQ ID NO: 4191 - DNA, 51 bp, synthetic construct
  misc_feature 1..51: note = Synthetic polynucleotide
  source 1..51: mol_type = other DNA
tcagggaggtggcgtggctcgggccyggggaaaaacagagtcagggcccaa

SEQ ID NO: 4192 - DNA, 51 bp, synthetic construct
  misc_feature 1..51: note = Synthetic polynucleotide
  source 1..51: mol_type = other DNA
tacttgcccacctggcagaaaatctrcttctacagttggggctgacagacc

SEQ ID NO: 4193 - DNA, 51 bp, synthetic construct
  misc_feature 1..51: note = Synthetic polynucleotide
  source 1..51: mol_type = other DNA
ttgatcctgagctgaccgggtagccrtggccttgcggctcctgaagctggc

SEQ ID NO: 4194 - DNA, 51 bp, synthetic construct
  misc_feature 1..51: note = Synthetic polynucleotide
  source 1..51: mol_type = other DNA
tggttgtacagcagtcgcctgctgcrgtactcagatgccttggagcacttg

SEQ ID NO: 4195 - DNA, 51 bp, synthetic construct
  misc_feature 1..51: note = Synthetic polynucleotide
  source 1..51: mol_type = other DNA
tatttttcagattgttcagtttggcdtgaatgaaaaggttgggcaaatctc

SEQ ID NO: 4196 - DNA, 51 bp, synthetic construct
  misc_feature 1..51: note = Synthetic polynucleotide
  source 1..51: mol_type = other DNA
tatttaccaaaagaacaatacctctrtaccaaagagcagctcttggatagg

SEQ ID NO: 4197 - DNA, 51 bp, synthetic construct
  misc_feature 1..51: note = Synthetic polynucleotide
  source 1..51: mol_type = other DNA
caaaattctttgtatcttttcatctrgctaaaagaccagcttcaggacaaa

SEQ ID NO: 4198 - DNA, 51 bp, synthetic construct
  misc_feature 1..51: note = Synthetic polynucleotide
  source 1..51: mol_type = other DNA
gaatctgtttcactgtcacacaggcragtgccttaattacagccttgtgtg

SEQ ID NO: 4199 - DNA, 51 bp, synthetic construct
  misc_feature 1..51: note = Synthetic polynucleotide
  source 1..51: mol_type = other DNA
catgaatttgccctacaacagtacargttatccaaattattttggccacag

SEQ ID NO: 4200 - DNA, 51 bp, synthetic construct
  misc_feature 1..51: note = Synthetic polynucleotide
  source 1..51: mol_type = other DNA
agcttacatgcagaatcctaatgccrtcatactgtgtattcaaggtaaatc

SEQ ID NO: 4201 - DNA, 51 bp, synthetic construct
  misc_feature 1..51: note = Synthetic polynucleotide
  source 1..51: mol_type = other DNA
cgtgggctgaagctgacggggacctrtagcatcatgatccagaaggtacgg

SEQ ID NO: 4202 - DNA, 51 bp, synthetic construct
  misc_feature 1..51: note = Synthetic polynucleotide
  source 1..51: mol_type = other DNA
tctacggggaagacctgcctgcccarggccttgctgaacctgagcaatggc

SEQ ID NO: 4203 - DNA, 51 bp, synthetic construct
  misc_feature 1..51: note = Synthetic polynucleotide
  source 1..51: mol_type = other DNA
ggcccgtgggcgcttcttccagcccraggatgaggggggctacttctactt

SEQ ID NO: 4204 - DNA, 51 bp, synthetic construct
  misc_feature 1..51: note = Synthetic polynucleotide
  source 1..51: mol_type = other DNA
gtctcggattgcaaagacggggaggrcgagtaccgctgtggtaaggtcatg

SEQ ID NO: 4205 - DNA, 51 bp, synthetic construct
  misc_feature 1..51: note = Synthetic polynucleotide
  source 1..51: mol_type = other DNA
gatggatatctgagaatattcctatrgtgataacaaccgaacctacagatg

SEQ ID NO: 4206 - DNA, 51 bp, synthetic construct
  misc_feature 1..51: note = Synthetic polynucleotide
  source 1..51: mol_type = other DNA
gtcctccagtggcctggacctgcccrtgaaggtggtggacatgttcgggtg

SEQ ID NO: 4207 - DNA, 51 bp, synthetic construct
  misc_feature 1..51: note = Synthetic polynucleotide
  source 1..51: mol_type = other DNA
gctaatggtttggggttttattttcrggttactggagacaatgttaattcc

SEQ ID NO: 4208 - DNA, 51 bp, synthetic construct
  misc_feature 1..51: note = Synthetic polynucleotide
  source 1..51: mol_type = other DNA
taccttctctcattttctcccagctrcatccgatactcccagatctgtgca

SEQ ID NO: 4209 - DNA, 51 bp, synthetic construct
  misc_feature 1..51: note = Synthetic polynucleotide
  source 1..51: mol_type = other DNA
cacaacaccagacccgtcgtaggtaytggaagtactgaccaatgttccaaa

SEQ ID NO: 4210 - DNA, 51 bp, synthetic construct
  misc_feature 1..51: note = Synthetic polynucleotide
  source 1..51: mol_type = other DNA
ctctgactgtacccccatgtttaggrggcagccatggccaagctggccgcc

SEQ ID NO: 4211 - DNA, 51 bp, synthetic construct
  misc_feature 1..51: note = Synthetic polynucleotide
  source 1..51: mol_type = other DNA
gggggaccctactggcaggaggtcarggtaacagcataaatcttcattgtt

SEQ ID NO: 4212 - DNA, 51 bp, synthetic construct
  misc_feature 1..51: note = Synthetic polynucleotide
  source 1..51: mol_type = other DNA
gaacccgaagctggagaaagcggagrtattggagttcgccgtgggctactt

SEQ ID NO: 4213 - DNA, 51 bp, synthetic construct
  misc_feature 1..51: note = Synthetic polynucleotide
  source 1..51: mol_type = other DNA
ggacgggaaccgtcgctatgccaagragtgccaggtggagcggcaggaagg

SEQ ID NO: 4214 - DNA, 51 bp, synthetic construct
  misc_feature 1..51: note = Synthetic polynucleotide
  source 1..51: mol_type = other DNA
ctcaaatttggattcagtagcagagratacgtcttgctccatgagtcgtcg

SEQ ID NO: 4215 - DNA, 51 bp, synthetic construct
  misc_feature 1..51: note = Synthetic polynucleotide
  source 1..51: mol_type = other DNA
aattgaacacctctcctttcccaagrtaagagatcatctttaagaaaaggc

SEQ ID NO: 4216 - DNA, 51 bp, synthetic construct
  misc_feature 1..51: note = Synthetic polynucleotide
  source 1..51: mol_type = other DNA
gtttttgttttccctcaaaggttcarcatacaaatttagggtcattgccat

SEQ ID NO: 4217 - DNA, 51 bp, synthetic construct
  misc_feature 1..51: note = Synthetic polynucleotide
  source 1..51: mol_type = other DNA
agaccctgaggccgaggggggaacartggggcccttgagggcccctcctcc

SEQ ID NO: 4218 - DNA, 51 bp, synthetic construct
  misc_feature 1..51: note = Synthetic polynucleotide
  source 1..51: mol_type = other DNA
tggatcctacccctcttttttctgcrgttgctgttctctgtgtctgtgact

SEQ ID NO: 4219 - DNA, 51 bp, synthetic construct
  misc_feature 1..51: note = Synthetic polynucleotide
  source 1..51: mol_type = other DNA
ctcgaagacctggtgtttgtaggcartcccttggaagagaaacattctgct

SEQ ID NO: 4220 - DNA, 51 bp, synthetic construct
  misc_feature 1..51: note = Synthetic polynucleotide
  source 1..51: mol_type = other DNA
agttttccctttattgctgaacggtytgaagcgtgcagagatggcatagaa

SEQ ID NO: 4221 - DNA, 51 bp, synthetic construct
  misc_feature 1..51: note = Synthetic polynucleotide
  source 1..51: mol_type = other DNA
aatggacaagtataattttgatacartgatatatgtggtaagtaatcagaa

SEQ ID NO: 4222 - DNA, 51 bp, synthetic construct
  misc_feature 1..51: note = Synthetic polynucleotide
  source 1..51: mol_type = other DNA
ctctgcgcgctccgggatccataccyggcaagcaatagcgcggcgaaagcc

SEQ ID NO: 4223 - DNA, 51 bp, synthetic construct
  misc_feature 1..51: note = Synthetic polynucleotide
  source 1..51: mol_type = other DNA
tgtctcctgcaggaccggccgcagcrtggacgctcccaggcggtttccgac

SEQ ID NO: 4224 - DNA, 51 bp, synthetic construct
  misc_feature 1..51: note = Synthetic polynucleotide
  source 1..51: mol_type = other DNA
taatcgtgccagttccaacataatcygtagagcaaagggctagattcatca

SEQ ID NO: 4225 - DNA, 51 bp, synthetic construct
  misc_feature 1..51: note = Synthetic polynucleotide
  source 1..51: mol_type = other DNA
ttcgtccttgaccgcagggtcctggrtatgcccacccaagaactgggcctc

SEQ ID NO: 4226 - DNA, 51 bp, synthetic construct
  misc_feature 1..51: note = Synthetic polynucleotide
  source 1..51: mol_type = other DNA
aacgggtatgagtgtgagtggcgctrtaacagctgtgcacctgcctgtcaa

SEQ ID NO: 4227 - DNA, 51 bp, synthetic construct
  misc_feature 1..51: note = Synthetic polynucleotide
  source 1..51: mol_type = other DNA
accttacctatccacagcttcttgtytgtcatggtcaaaatcttgtaccat

SEQ ID NO: 4228 - DNA, 51 bp, synthetic construct
  misc_feature 1..51: note = Synthetic polynucleotide
  source 1..51: mol_type = other DNA
gctgagaaatgtcttactctcttgcrgggagaatgctgttgaaagacttga

SEQ ID NO: 4229 - DNA, 51 bp, synthetic construct
  misc_feature 1..51: note = Synthetic polynucleotide
  source 1..51: mol_type = other DNA
cggaccctggaggacctgacagaagrcagcatgtggtgggtcctgccccca

SEQ ID NO: 4230 - DNA, 51 bp, synthetic construct
  misc_feature 1..51: note = Synthetic polynucleotide
  source 1..51: mol_type = other DNA
gaagtgacgtcaggcggccgcggagrtggaggatttgctcgacttggacga

SEQ ID NO: 4231 - DNA, 51 bp, synthetic construct
  misc_feature 1..51: note = Synthetic polynucleotide
  source 1..51: mol_type = other DNA
aacatttggatcaacctcacaatcargtagtttttcaaaaattcataagcg

SEQ ID NO: 4232 - DNA, 51 bp, synthetic construct
  misc_feature 1..51: note = Synthetic polynucleotide
  source 1..51: mol_type = other DNA
gtagtaaaaggacacatcttacataygtaggtagctgattttttggatgat

SEQ ID NO: 4233 - DNA, 51 bp, synthetic construct
  misc_feature 1..51: note = Synthetic polynucleotide
  source 1..51: mol_type = other DNA
tttcaggaaggagaaaacattttctrtttggcagttgaagatatagaaaca

SEQ ID NO: 4234 - DNA, 51 bp, synthetic construct
  misc_feature 1..51: note = Synthetic polynucleotide
  source 1..51: mol_type = other DNA
ctatagttctctgggggacttaccaytggggtctttcctgaatagtgtatt

SEQ ID NO: 4235 - DNA, 51 bp, synthetic construct
  misc_feature 1..51: note = Synthetic polynucleotide
  source 1..51: mol_type = other DNA
accaactgagtttttcttccacacartggccggccgggaaggtctagtcga

SEQ ID NO: 4236 - DNA, 51 bp, synthetic construct
  misc_feature 1..51: note = Synthetic polynucleotide
  source 1..51: mol_type = other DNA
tactggatctcggcccgcagctcctyggtgacgtagttcaccagcatggcc

SEQ ID NO: 4237 - DNA, 51 bp, synthetic construct
  misc_feature 1..51: note = Synthetic polynucleotide
  source 1..51: mol_type = other DNA
tactttgccctcagcatctcccttcrtgtctgggtcatggtaagagtggca

SEQ ID NO: 4238 - DNA, 51 bp, synthetic construct
  misc_feature 1..51: note = Synthetic polynucleotide
  source 1..51: mol_type = other DNA
ttcctccccacagcagcagtgttgtrctgctacttctataaacggacagcc

SEQ ID NO: 4239 - DNA, 51 bp, synthetic construct
  misc_feature 1..51: note = Synthetic polynucleotide
  source 1..51: mol_type = other DNA
aaaggaacacgggcatatgcctgccrgtgtagctggagaactattgaagaa

SEQ ID NO: 4240 - DNA, 51 bp, synthetic construct
  misc_feature 1..51: note = Synthetic polynucleotide
  source 1..51: mol_type = other DNA
cccaagtggccgcaggcagatggatrtgtgggggacacgcagcaggtgagg

SEQ ID NO: 4241 - DNA, 51 bp, synthetic construct
  misc_feature 1..51: note = Synthetic polynucleotide
  source 1..51: mol_type = other DNA
agcagtgagacatactttcttggtgyccacagaggtatacagaagcaccat

SEQ ID NO: 4242 - DNA, 51 bp, synthetic construct
  misc_feature 1..51: note = Synthetic polynucleotide
  source 1..51: mol_type = other DNA
agcctgcaggaggagctgaaccaggraaaggggcagaaggaggtgctgctg

SEQ ID NO: 4243 - DNA, 51 bp, synthetic construct
  misc_feature 1..51: note = Synthetic polynucleotide
  source 1..51: mol_type = other DNA
caaggacaagcccgtttctttccacragtgaggaccctgcgcgcctcgcgg

SEQ ID NO: 4244 - DNA, 51 bp, synthetic construct
  misc_feature 1..51: note = Synthetic polynucleotide
  source 1..51: mol_type = other DNA
aacaaacggcaaatgagtcgcatttrccccaagggaggccgagtcgattcc

SEQ ID NO: 4245 - DNA, 51 bp, synthetic construct
  misc_feature 1..51: note = Synthetic polynucleotide
  source 1..51: mol_type = other DNA
cactacttcatcagttcttcccatavcacttatctcactggcagacagttc

SEQ ID NO: 4246 - DNA, 51 bp, synthetic construct
  misc_feature 1..51: note = Synthetic polynucleotide
  source 1..51: mol_type = other DNA
gggagacggcgggatctctttcgccrtggctgccgggccgatctccgagcg

SEQ ID NO: 4247 - DNA, 51 bp, synthetic construct
  misc_feature 1..51: note = Synthetic polynucleotide
  source 1..51: mol_type = other DNA
tgggacatagaacgaggagagaattrtatactgagtccagatgagaagttt

SEQ ID NO: 4248 - DNA, 51 bp, synthetic construct
  misc_feature 1..51: note = Synthetic polynucleotide
  source 1..51: mol_type = other DNA
gacagaagacgaagtggagaagttgrtggctgggcaagaggactccaatgg

SEQ ID NO: 4249 - DNA, 51 bp, synthetic construct
  misc_feature 1..51: note = Synthetic polynucleotide
  source 1..51: mol_type = other DNA
atatctcagcttctaagagagagctrtttagctgaaaccagacatcgggga

SEQ ID NO: 4250 - DNA, 51 bp, synthetic construct
  misc_feature 1..51: note = Synthetic polynucleotide
  source 1..51: mol_type = other DNA
tgagtttgcggagaggtcagtaactraattggagaaaagcattgatgactt

SEQ ID NO: 4251 - DNA, 51 bp, synthetic construct
  misc_feature 1..51: note = Synthetic polynucleotide
  source 1..51: mol_type = other DNA
agctgcttacacagagaagtctgctrcatatgtcaacactgagggtagagc

SEQ ID NO: 4252 - DNA, 51 bp, synthetic construct
  misc_feature 1..51: note = Synthetic polynucleotide
  source 1..51: mol_type = other DNA
aattccttttattgaaacatcagcaragacaagacaggtaagtaacactga

SEQ ID NO: 4253 - DNA, 51 bp, synthetic construct
  misc_feature 1..51: note = Synthetic polynucleotide
  source 1..51: mol_type = other DNA
gaagatgaactcatctgcaaaaacahcacgtaggaagcgaaagcaactgta

SEQ ID NO: 4254 - DNA, 51 bp, synthetic construct
  misc_feature 1..51: note = Synthetic polynucleotide
  source 1..51: mol_type = other DNA
ggcacccgtcggaagtccagaatccygcaagagaggaagctctgttccatc

SEQ ID NO: 4255 - DNA, 51 bp, synthetic construct
  misc_feature 1..51: note = Synthetic polynucleotide
  source 1..51: mol_type = other DNA
aggctttctcatcttgactgtaatcygcaaaggaggagaagggcaatgaga

SEQ ID NO: 4256 - DNA, 51 bp, synthetic construct
  misc_feature 1..51: note = Synthetic polynucleotide
  source 1..51: mol_type = other DNA
ctgcttcacatcttcacggtcaacaracagctggggcccaagatcgtcatc

SEQ ID NO: 4257 - DNA, 51 bp, synthetic construct
  misc_feature 1..51: note = Synthetic polynucleotide
  source 1..51: mol_type = other DNA
gctgtcgcccgcagatttcttcgccragcgcaagagatcagcgcctgagaa

SEQ ID NO: 4258 - DNA, 51 bp, synthetic construct
  misc_feature 1..51: note = Synthetic polynucleotide
  source 1..51: mol_type = other DNA
agtgtgcctctgtttttcctttgacrggaaatcgatgattgtctggtccaa

SEQ ID NO: 4259 - DNA, 51 bp, synthetic construct
  misc_feature 1..51: note = Synthetic polynucleotide
  source 1..51: mol_type = other DNA
tgtgacattcttcgacacgccccccrtgctctttgtgttcattgccctggg

SEQ ID NO: 4260 - DNA, 51 bp, synthetic construct
  misc_feature 1..51: note = Synthetic polynucleotide
  source 1..51: mol_type = other DNA
gtccacacccatgctctgcagcgtgygcacagccagggcagcctcctgctt

SEQ ID NO: 4261 - DNA, 51 bp, synthetic construct
  misc_feature 1..51: note = Synthetic polynucleotide
  source 1..51: mol_type = other DNA
acattttgtgtttatgttatttgcartgttttctatggaaatatttcacag

SEQ ID NO: 4262 - DNA, 51 bp, synthetic construct
  misc_feature 1..51: note = Synthetic polynucleotide
  source 1..51: mol_type = other DNA
gctcgaggcctggcttgagatgaggytctcattgtgaaaccactgtgtgga

SEQ ID NO: 4263 - DNA, 51 bp, synthetic construct
  misc_feature 1..51: note = Synthetic polynucleotide
  source 1..51: mol_type = other DNA
tatggctgcgtggtgaacttgcggargacagtggtgaacttccctgtagaa

SEQ ID NO: 4264 - DNA, 51 bp, synthetic construct
  misc_feature 1..51: note = Synthetic polynucleotide
  source 1..51: mol_type = other DNA
gttgatcaaaccaccgtggacacctyctttgcccatcagcaggactagcgc

SEQ ID NO: 4265 - DNA, 51 bp, synthetic construct
  misc_feature 1..51: note = Synthetic polynucleotide
  source 1..51: mol_type = other DNA
gttgcacagaagtcatatggaaatgraaaaaggtaagattatttttctggt

SEQ ID NO: 4266 - DNA, 51 bp, synthetic construct
  misc_feature 1..51: note = Synthetic polynucleotide
  source 1..51: mol_type = other DNA
gataaaagtcatctccaaaccttccraaaagaagcagtcattgaaaaatgc

SEQ ID NO: 4267 - DNA, 51 bp, synthetic construct
  misc_feature 1..51: note = Synthetic polynucleotide
  source 1..51: mol_type = other DNA
ggtcatcctggcccctttgcagagaracactgcagaagctaagacatagga

SEQ ID NO: 4268 - DNA, 51 bp, synthetic construct
  misc_feature 1..51: note = Synthetic polynucleotide
  source 1..51: mol_type = other DNA
cacagaaacatcaaaaagtaggtccygtttcttttcagaagctcgatcaca

SEQ ID NO: 4269 - DNA, 51 bp, synthetic construct
  misc_feature 1..51: note = Synthetic polynucleotide
  source 1..51: mol_type = other DNA
aaaatctctagtgttctaagctacarcgaaaaactgctgaaagaaaaggaa

SEQ ID NO: 4270 - DNA, 51 bp, synthetic construct
  misc_feature 1..51: note = Synthetic polynucleotide
  source 1..51: mol_type = other DNA
gacatttcccctcaagcaccaacacrttttctggtgatacccaagaaacat

SEQ ID NO: 4271 - DNA, 51 bp, synthetic construct
  misc_feature 1..51: note = Synthetic polynucleotide
  source 1..51: mol_type = other DNA
gagctgggtgaagcagctgatgaggyagatgcacacaaaggcattctggac

SEQ ID NO: 4272 - DNA, 51 bp, synthetic construct
  misc_feature 1..51: note = Synthetic polynucleotide
  source 1..51: mol_type = other DNA
gctggggccaactggaaccattggcrgctgcacgctcattactaccctccg

SEQ ID NO: 4273 - DNA, 51 bp, synthetic construct
  misc_feature 1..51: note = Synthetic polynucleotide
  source 1..51: mol_type = other DNA
acttgctgagtgtgtttctcaaacartttaatttcaggagcctacaagaaa

SEQ ID NO: 4274 - DNA, 51 bp, synthetic construct
  misc_feature 1..51: note = Synthetic polynucleotide
  source 1..51: mol_type = other DNA
gcaaagcatggattcaaacttaggtrttggaaccaggtttttgtgtttgcc

SEQ ID NO: 4275 - DNA, 51 bp, synthetic construct
  misc_feature 1..51: note = Synthetic polynucleotide
  source 1..51: mol_type = other DNA
tgatgggttgtgtttggtttctttcvgcatgattttgaagtcagaggagat

SEQ ID NO: 4276 - DNA, 51 bp, synthetic construct
  misc_feature 1..51: note = Synthetic polynucleotide
  source 1..51: mol_type = other DNA
gtgcagccagatgcctggacagaggrcaatggcttccatggtaaggtgcct

SEQ ID NO: 4277 - DNA, 51 bp, synthetic construct
  misc_feature 1..51: note = Synthetic polynucleotide
  source 1..51: mol_type = other DNA
tatgctatacatgatgaaacatcttrtaaaggaaaaaaaataccgaaagac

SEQ ID NO: 4278 - DNA, 51 bp, synthetic construct
  misc_feature 1..51: note = Synthetic polynucleotide
  source 1..51: mol_type = other DNA
acaattttcccctttttttacccccrgtggtatgtgggagtttgtttcata

SEQ ID NO: 4279 - DNA, 51 bp, synthetic construct
  misc_feature 1..51: note = Synthetic polynucleotide
  misc_difference 26: note = n is a, c, g, t or u
  source 1..51: mol_type = other DNA
aaagtggccattattgaacttacagntgggtggtatgctgttaaggcccag

SEQ ID NO: 4280 - DNA, 51 bp, synthetic construct
  misc_feature 1..51: note = Synthetic polynucleotide
  source 1..51: mol_type = other DNA
gaattaataatccttttgttttcttdgaaaacacaacaaaaccatatttac

SEQ ID NO: 4281 - DNA, 51 bp, synthetic construct
  misc_feature 1..51: note = Synthetic polynucleotide
  source 1..51: mol_type = other DNA
aataatggaacccttgttgaccgctrccgtaaacacaacctctactttgag

SEQ ID NO: 4282 - DNA, 51 bp, synthetic construct
  misc_feature 1..51: note = Synthetic polynucleotide
  source 1..51: mol_type = other DNA
acccctctggagtccttttggtaccrtgacatggaaaatcccaaaagtcac

SEQ ID NO: 4283 - DNA, 51 bp, synthetic construct
  misc_feature 1..51: note = Synthetic polynucleotide
  source 1..51: mol_type = other DNA
atcatgaagaagctcttgaccaagtrtgacaacctctttgagacgtccttt

SEQ ID NO: 4284 - DNA, 51 bp, synthetic construct
  misc_feature 1..51: note = Synthetic polynucleotide
  source 1..51: mol_type = other DNA
tgttacgtggttgccctgggagcccrcaccggggaggagagcgtggctgac

SEQ ID NO: 4285 - DNA, 51 bp, synthetic construct
  misc_feature 1..51: note = Synthetic polynucleotide
  source 1..51: mol_type = other DNA
caccaccaaagtggatgcactgaagragatgttgttggatcaggtgagcag

SEQ ID NO: 4286 - DNA, 51 bp, synthetic construct
  misc_feature 1..51: note = Synthetic polynucleotide
  source 1..51: mol_type = other DNA
gttgctgccccctttgatgatgatgrcaagatcgttgggggctacaactgt

SEQ ID NO: 4287 - DNA, 51 bp, synthetic construct
  misc_feature 1..51: note = Synthetic polynucleotide
  source 1..51: mol_type = other DNA
gactaaccctgcagtgctttccctcrgtgcatccaccgggacgtggcagcg

SEQ ID NO: 4288 - DNA, 51 bp, synthetic construct
  misc_feature 1..51: note = Synthetic polynucleotide
  source 1..51: mol_type = other DNA
gaaaacgtttctttttctttgttctrggtggttctggaatggagccgagat

SEQ ID NO: 4289 - DNA, 51 bp, synthetic construct
  misc_feature 1..51: note = Synthetic polynucleotide
  source 1..51: mol_type = other DNA
aaatattatatatcacatattttcarcagggcctcagggtgtggaagggcc

SEQ ID NO: 4290 - DNA, 51 bp, synthetic construct
  misc_feature 1..51: note = Synthetic polynucleotide
  misc_difference 26: note = n is a, c, g, t or u
  source 1..51: mol_type = other DNA
tgggaatgctttatggcttaatgaangagagtgctcaattcagagaagaaa

SEQ ID NO: 4291 - DNA, 51 bp, synthetic construct
  misc_feature 1..51: note = Synthetic polynucleotide
  source 1..51: mol_type = other DNA
tctcttcttgaaacagtggagcatcrtacagagtttacttgtggtttagac

SEQ ID NO: 4292 - DNA, 51 bp, synthetic construct
  misc_feature 1..51: note = Synthetic polynucleotide
  source 1..51: mol_type = other DNA
acaacgtccttggagaaaacatgcaratattccattgtaaacaaatcaaag

SEQ ID NO: 4293 - DNA, 51 bp, synthetic construct
  misc_feature 1..51: note = Synthetic polynucleotide
  source 1..51: mol_type = other DNA
tcaaaggaaaaatacatttaagattvtaagtctggttataagcttaaaaag

SEQ ID NO: 4294 - DNA, 51 bp, synthetic construct
  misc_feature 1..51: note = Synthetic polynucleotide
  source 1..51: mol_type = other DNA
gcggcagagcgccagcgagcgggagraactgcgcatgcgcacgctggcccg

SEQ ID NO: 4295 - DNA, 51 bp, synthetic construct
  misc_feature 1..51: note = Synthetic polynucleotide
  source 1..51: mol_type = other DNA
taggggaggccataaggagcgccccrcagtcatgctgtttccctttaggaa

SEQ ID NO: 4296 - DNA, 51 bp, synthetic construct
  misc_feature 1..51: note = Synthetic polynucleotide
  source 1..51: mol_type = other DNA
ccccacagtcatgctgtttccctttrggaatctcggctcaccaacccaggt

SEQ ID NO: 4297 - DNA, 51 bp, synthetic construct
  misc_feature 1..51: note = Synthetic polynucleotide
  source 1..51: mol_type = other DNA
acaacacgctgaagaatttcttatcraacctgaatccaaagttgctaagtt

SEQ ID NO: 4298 - DNA, 51 bp, synthetic construct
  misc_feature 1..51: note = Synthetic polynucleotide
  source 1..51: mol_type = other DNA
agaatttcttatcaaacctgaatccraagttgctaagttggacacgtctca

SEQ ID NO: 4299 - DNA, 51 bp, synthetic construct
  misc_feature 1..51: note = Synthetic polynucleotide
  source 1..51: mol_type = other DNA
gaattttgataagctgaatgtaaggrcaacacactatacacctcttgcatg

SEQ ID NO: 4300 - DNA, 51 bp, synthetic construct
  misc_feature 1..51: note = Synthetic polynucleotide
  source 1..51: mol_type = other DNA
gtaaatgccatctgctatggggccargattatgcttccaggtgttcttcga

SEQ ID NO: 4301 - DNA, 51 bp, synthetic construct
  misc_feature 1..51: note = Synthetic polynucleotide
  source 1..51: mol_type = other DNA
gcatgtcgtcttcccacttgcaataytgccctcgacacagatctggcaaaa

SEQ ID NO: 4302 - DNA, 51 bp, synthetic construct
  misc_feature 1..51: note = Synthetic polynucleotide
  source 1..51: mol_type = other DNA
aaccaacaacccactcaccagaggaytgtggccacggacatttctccactt

SEQ ID NO: 4303 - DNA, 51 bp, synthetic construct
  misc_feature 1..51: note = Synthetic polynucleotide
  source 1..51: mol_type = other DNA
agtttaccttcggaccaatcctgagrcttgttaccagaggttaaagaagag

SEQ ID NO: 4304 - DNA, 51 bp, synthetic construct
  misc_feature 1..51: note = Synthetic polynucleotide
  source 1..51: mol_type = other DNA
tttattttctctttggttttatcgtrggtttatttgacatggcctgtgcca

SEQ ID NO: 4305 - DNA, 51 bp, synthetic construct
  misc_feature 1..51: note = Synthetic polynucleotide
  source 1..51: mol_type = other DNA
ttcacatcgcggaaagtccctgctcrcatgcctcacatgattgaccggatt

SEQ ID NO: 4306 - DNA, 51 bp, synthetic construct
  misc_feature 1..51: note = Synthetic polynucleotide
  source 1..51: mol_type = other DNA
aggaagtttgtttgcctgaatgacarcattgaccacaatcataaagatgct

SEQ ID NO: 4307 - DNA, 51 bp, synthetic construct
  misc_feature 1..51: note = Synthetic polynucleotide
  source 1..51: mol_type = other DNA
agcaaaaatactgggaggcaactaaragatacatttgcagattccctcaga

SEQ ID NO: 4308 - DNA, 51 bp, synthetic construct
  misc_feature 1..51: note = Synthetic polynucleotide
  source 1..51: mol_type = other DNA
tccacgctgctctgcagcctgtgctrcggcgacatggagaacaagctgttt

SEQ ID NO: 4309 - DNA, 51 bp, synthetic construct
  misc_feature 1..51: note = Synthetic polynucleotide
  source 1..51: mol_type = other DNA
tagagaaactggagcagctcattttrgaagggtaagaaagagctcattaaa

SEQ ID NO: 4310 - DNA, 51 bp, synthetic construct
  misc_feature 1..51: note = Synthetic polynucleotide
  source 1..51: mol_type = other DNA
tttggctgacctgcctagaaatattrtgttgaataatgatgagttggaatt

SEQ ID NO: 4311 - DNA, 51 bp, synthetic construct
  misc_feature 1..51: note = Synthetic polynucleotide
  source 1..51: mol_type = other DNA
ttcaaagcaaattgacaaatcctctrtgtacaagtttttagaaccatggct

SEQ ID NO: 4312 - DNA, 51 bp, synthetic construct
  misc_feature 1..51: note = Synthetic polynucleotide
  source 1..51: mol_type = other DNA
cttatgtttaaagaaggatgggaacrcaaaaagagccttcagatcctacat

SEQ ID NO: 4313 - DNA, 51 bp, synthetic construct
  misc_feature 1..51: note = Synthetic polynucleotide
  source 1..51: mol_type = other DNA
ggtgggcctgggaggggtggtggccdttttttgtctaaccctaactgagaa

SEQ ID NO: 4314 - DNA, 51 bp, synthetic construct
  misc_feature 1..51: note = Synthetic polynucleotide
  source 1..51: mol_type = other DNA
gaggggtggtggccattttttgtctraccctaactgagaagggcgtaggcg

SEQ ID NO: 4315 - DNA, 51 bp, synthetic construct
  misc_feature 1..51: note = Synthetic polynucleotide
  source 1..51: mol_type = other DNA
catgtgtttcctctttgaaacagagratgctctcatcactcagtcaaggct

SEQ ID NO: 4316 - DNA, 51 bp, synthetic construct
  misc_feature 1..51: note = Synthetic polynucleotide
  source 1..51: mol_type = other DNA
gccgttagcctgatcatcttcacctrctacaccgcctgggtgattctcttg

SEQ ID NO: 4317 - DNA, 51 bp, synthetic construct
  misc_feature 1..51: note = Synthetic polynucleotide
  source 1..51: mol_type = other DNA
ggagagacatcgtcagctacgtcatrgaccacttcgacattgagatcatgg

SEQ ID NO: 4318 - DNA, 51 bp, synthetic construct
  misc_feature 1..51: note = Synthetic polynucleotide
  source 1..51: mol_type = other DNA
ttatgttctatttcagtgtcatcctrgtggctgtttgatagacctctgcct

SEQ ID NO: 4319 - DNA, 51 bp, synthetic construct
  misc_feature 1..51: note = Synthetic polynucleotide
  source 1..51: mol_type = other DNA
cctttttacatagaaaaggttcatgragaaattgaaagagtcattggcgcc

SEQ ID NO: 4320 - DNA, 51 bp, synthetic construct
  misc_feature 1..51: note = Synthetic polynucleotide
  source 1..51: mol_type = other DNA
ggtgtgctctttgtgaaattccaccrtggcgtaccgtggccagggtcagaa

SEQ ID NO: 4321 - DNA, 51 bp, synthetic construct
  misc_feature 1..51: note = Synthetic polynucleotide
  source 1..51: mol_type = other DNA
acctgtgttgtggtttacactggatrtggaaatagagaggagcaaaatctg

SEQ ID NO: 4322 - DNA, 51 bp, synthetic construct
  misc_feature 1..51: note = Synthetic polynucleotide
  source 1..51: mol_type = other DNA
catgcagagaaccatgcgcacacgcragcgcagaaagatgtatgagatgtg

SEQ ID NO: 4323 - DNA, 51 bp, synthetic construct
  misc_feature 1..51: note = Synthetic polynucleotide
  source 1..51: mol_type = other DNA
tgttcagtgtcaatgtatcttggcaytggaaatctggagtgaagaatttcc

SEQ ID NO: 4324 - DNA, 51 bp, synthetic construct
  misc_feature 1..51: note = Synthetic polynucleotide
  source 1..51: mol_type = other DNA
accctccacggctgcgtcactcgggyaataataggtgatgatctccgtcac

SEQ ID NO: 4325 - DNA, 51 bp, synthetic construct
  misc_feature 1..51: note = Synthetic polynucleotide
  source 1..51: mol_type = other DNA
gtgactgtcaggacccttctgagcayggcagtgatggttgctctgggcagc

SEQ ID NO: 4326 - DNA, 51 bp, synthetic construct
  misc_feature 1..51: note = Synthetic polynucleotide
  source 1..51: mol_type = other DNA
cactatcactgccctgctccacaatratcggaaactcctggaaaaacacat

SEQ ID NO: 4327 - DNA, 51 bp, synthetic construct
  misc_feature 1..51: note = Synthetic polynucleotide
  source 1..51: mol_type = other DNA
ataaactaatacaccagtcttgtaarccggagatgaaaacctttttccaag

SEQ ID NO: 4328 - DNA, 51 bp, synthetic construct
  misc_feature 1..51: note = Synthetic polynucleotide
  source 1..51: mol_type = other DNA
tttttttacttttctagatttgaaarttgtggaatttttattgttatgttg

SEQ ID NO: 4329 - DNA, 51 bp, synthetic construct
  misc_feature 1..51: note = Synthetic polynucleotide
  source 1..51: mol_type = other DNA
ccggtcggagtaaacacagaatgctrtcgaatctatgaggcttgctcctat

SEQ ID NO: 4330 - DNA, 51 bp, synthetic construct
  misc_feature 1..51: note = Synthetic polynucleotide
  source 1..51: mol_type = other DNA
actgatttttttctcctccccccacrggagatccaccacctgcatcacctg

SEQ ID NO: 4331 - DNA, 51 bp, synthetic construct
  misc_feature 1..51: note = Synthetic polynucleotide
  source 1..51: mol_type = other DNA
ggatttgtttgcttttttcctgtacrggaaactggatgccttcatctatga

SEQ ID NO: 4332 - DNA, 51 bp, synthetic construct
  misc_feature 1..51: note = Synthetic polynucleotide
  source 1..51: mol_type = other DNA
attctctacgtggatttggatctgcrccatggagatggtaagccctttggt

SEQ ID NO: 4333 - DNA, 51 bp, synthetic construct
  misc_feature 1..51: note = Synthetic polynucleotide
  source 1..51: mol_type = other DNA
acactatcctctgagatcccagatcrtgaggtaagtaaggctctgacaagt

SEQ ID NO: 4334 - DNA, 51 bp, synthetic construct
  misc_feature 1..51: note = Synthetic polynucleotide
  source 1..51: mol_type = other DNA
gcagacctgcgcaagctggcggtgarcatggtgcccttccctcgcctgcac

SEQ ID NO: 4335 - DNA, 51 bp, synthetic construct
  misc_feature 1..51: note = Synthetic polynucleotide
  source 1..51: mol_type = other DNA
attgctgaatgttcacaggatggcartggttatatcagtgcagcagaacta

SEQ ID NO: 4336 - DNA, 51 bp, synthetic construct
  misc_feature 1..51: note = Synthetic polynucleotide
  source 1..51: mol_type = other DNA
gccccacccacccccctgcagtgtcrtgcggttcctggtgtccaagcggaa

SEQ ID NO: 4337 - DNA, 51 bp, synthetic construct
  misc_feature 1..51: note = Synthetic polynucleotide
  source 1..51: mol_type = other DNA
tgtattcttttttcgttttcctgtargttcgaagcattcagcaaacaatgg

SEQ ID NO: 4338 - DNA, 51 bp, synthetic construct
  misc_feature 1..51: note = Synthetic polynucleotide
  source 1..51: mol_type = other DNA
tgaacaatcatcagctggaactggcraagcagctacacaaagagggtcatc

SEQ ID NO: 4339 - DNA, 51 bp, synthetic construct
  misc_feature 1..51: note = Synthetic polynucleotide
  source 1..51: mol_type = other DNA
ccccatcaggtatgacaatcggtgcrggaacatgagccaggagcaggtggc

SEQ ID NO: 4340 - DNA, 51 bp, synthetic construct
  misc_feature 1..51: note = Synthetic polynucleotide
  source 1..51: mol_type = other DNA
tgccttgtacaactacatctttgctragaagtaccaggggagcttcatcct

SEQ ID NO: 4341 - DNA, 51 bp, synthetic construct
  misc_feature 1..51: note = Synthetic polynucleotide
  source 1..51: mol_type = other DNA
acccttcatggatcagcattatttcraagaggacaaacacaggtaatttat

SEQ ID NO: 4342 - DNA, 51 bp, synthetic construct
  misc_feature 1..51: note = Synthetic polynucleotide
  source 1..51: mol_type = other DNA
cctttcaccataagagttacatctgragtcctagagtcaaatggtatggta

SEQ ID NO: 4343 - DNA, 51 bp, synthetic construct
  misc_feature 1..51: note = Synthetic polynucleotide
  source 1..51: mol_type = other DNA
attttttttttaacagatttggttcrtttgacttgcacatcttctaaaaca

SEQ ID NO: 4344 - DNA, 51 bp, synthetic construct
  misc_feature 1..51: note = Synthetic polynucleotide
  source 1..51: mol_type = other DNA
ttgtgttttgtgatggaatatgttartgggggcgaggtgagtcaagaagta

SEQ ID NO: 4345 - DNA, 51 bp, synthetic construct
  misc_feature 1..51: note = Synthetic polynucleotide
  source 1..51: mol_type = other DNA
cccagcaggaagaagggggacaactrttacctgaatcggactcacatgctg

SEQ ID NO: 4346 - DNA, 51 bp, synthetic construct
  misc_feature 1..51: note = Synthetic polynucleotide
  source 1..51: mol_type = other DNA
caagtgccgggaatcatttcacgggrgtccgctgggcggccagcagtgcta

SEQ ID NO: 4347 - DNA, 51 bp, synthetic construct
  misc_feature 1..51: note = Synthetic polynucleotide
  source 1..51: mol_type = other DNA
cctcatcgtctccttttcatcctctrggtcctctggacacagacatgcagc

SEQ ID NO: 4348 - DNA, 51 bp, synthetic construct
  misc_feature 1..51: note = Synthetic polynucleotide
  source 1..51: mol_type = other DNA
gaccgcaatgtggccaccccacgagrctactactttgctctggcccatacc

SEQ ID NO: 4349 - DNA, 51 bp, synthetic construct
  misc_feature 1..51: note = Synthetic polynucleotide
  source 1..51: mol_type = other DNA
ttacttagtatttgcttttcaggacrtgtgaatttctctgatgaggtcaca

SEQ ID NO: 4350 - DNA, 51 bp, synthetic construct
  misc_feature 1..51: note = Synthetic polynucleotide
  source 1..51: mol_type = other DNA
gctgttcaacatgaaaccttaaactrtataggtctgctggactgtgtggct

SEQ ID NO: 4351 - DNA, 51 bp, synthetic construct
  misc_feature 1..51: note = Synthetic polynucleotide
  source 1..51: mol_type = other DNA
aagaaagacgtttttgatttttttcrgacttctctggctccactaccctgc

SEQ ID NO: 4352 - DNA, 51 bp, synthetic construct
  misc_feature 1..51: note = Synthetic polynucleotide
  source 1..51: mol_type = other DNA
tggagcatcctgtgaagatatagctrgagtctgtcatgcacatccggtaat

SEQ ID NO: 4353 - DNA, 51 bp, synthetic construct
  misc_feature 1..51: note = Synthetic polynucleotide
  misc_difference 26: note = n is a, c, g, t or u
  source 1..51: mol_type = other DNA
actaacattaagaacaaacaaacccntatttttagtttcccaagtctatct

SEQ ID NO: 4354 - DNA, 51 bp, synthetic construct
  misc_feature 1..51: note = Synthetic polynucleotide
  source 1..51: mol_type = other DNA
agagatgagagaccactctttccccragtaagtaaaagcttcatgctatcc

SEQ ID NO: 4355 - DNA, 51 bp, synthetic construct
  misc_feature 1..51: note = Synthetic polynucleotide
  source 1..51: mol_type = other DNA
gtaggcaagagtgccttgacgatacdgctaattcagaatcattttgtggac

SEQ ID NO: 4356 - DNA, 51 bp, synthetic construct
  misc_feature 1..51: note = Synthetic polynucleotide
  source 1..51: mol_type = other DNA
actttttatgtatttcagggtgttgdtgatgccttctatacattagttcga

SEQ ID NO: 4357 - DNA, 51 bp, synthetic construct
  misc_feature 1..51: note = Synthetic polynucleotide
  source 1..51: mol_type = other DNA
tagtaaaagtaaccctggagacttcrcactttccgttaggtaagttggaat

SEQ ID NO: 4358 - DNA, 51 bp, synthetic construct
  misc_feature 1..51: note = Synthetic polynucleotide
  misc_difference 26: note = n is a, c, g, t or u
  source 1..51: mol_type = other DNA
agctgtcacccacatcaagattcagnacactggtgattactatgacctgta

SEQ ID NO: 4359 - DNA, 51 bp, synthetic construct
  misc_feature 1..51: note = Synthetic polynucleotide
  source 1..51: mol_type = other DNA
tttctttctttccagacactacaacracaggagtgcaaacttctctacagc

SEQ ID NO: 4360 - DNA, 51 bp, synthetic construct
  misc_feature 1..51: note = Synthetic polynucleotide
  source 1..51: mol_type = other DNA
caaaaacaaaaatagatataaaaacrtcctgccctgtaagtatcaatattc

SEQ ID NO: 4361 - DNA, 51 bp, synthetic construct
  misc_feature 1..51: note = Synthetic polynucleotide
  source 1..51: mol_type = other DNA
gatggtgcggtctcagaggtcagggrtggtccagacagaagcacagtaccg

SEQ ID NO: 4362 - DNA, 51 bp, synthetic construct
  misc_feature 1..51: note = Synthetic polynucleotide
  source 1..51: mol_type = other DNA
acttgtggctacaaatttcatgagcrctgtagcaccaaagtacctactatg

SEQ ID NO: 4363 - DNA, 51 bp, synthetic construct
  misc_feature 1..51: note = Synthetic polynucleotide
  source 1..51: mol_type = other DNA
aattgtgacccagtggtgcgagggcrgcagcctctacaaacacctgcatgt

SEQ ID NO: 4364 - DNA, 51 bp, synthetic construct
  misc_feature 1..51: note = Synthetic polynucleotide
  source 1..51: mol_type = other DNA
tattaaagtggcaatgtgtgctgacraggtaggaaactgagcttttctatt

SEQ ID NO: 4365 - DNA, 51 bp, synthetic construct
  misc_feature 1..51: note = Synthetic polynucleotide
  source 1..51: mol_type = other DNA
gcggctggaagcctttctcacccagraagccaaggtcggcgaactcaaaga

SEQ ID NO: 4366 - DNA, 51 bp, synthetic construct
  misc_feature 1..51: note = Synthetic polynucleotide
  source 1..51: mol_type = other DNA
ggagaatgaaggaaggctggtgcacrtcattggcgccttacggacatccaa

SEQ ID NO: 4367 - DNA, 51 bp, synthetic construct
  misc_feature 1..51: note = Synthetic polynucleotide
  source 1..51: mol_type = other DNA
ctgatggctgcagccatgacaagcargtgggtggcagatgctcttgggcgg

SEQ ID NO: 4368 - DNA, 51 bp, synthetic construct
  misc_feature 1..51: note = Synthetic polynucleotide
  source 1..51: mol_type = other DNA
ccttctttcttctaggtcagctactrttttcccctcaaaacattgtggcgt

SEQ ID NO: 4369 - DNA, 51 bp, synthetic construct
  misc_feature 1..51: note = Synthetic polynucleotide
  source 1..51: mol_type = other DNA
ggcgtggacttcgagggcacgttccrtgtgaacacggtcacggatgacgac

SEQ ID NO: 4370 - DNA, 51 bp, synthetic construct
  misc_feature 1..51: note = Synthetic polynucleotide
  source 1..51: mol_type = other DNA
aatggcacgttcacttgtgacgtcaraaaccctccagacatagtgggcaag

SEQ ID NO: 4371 - DNA, 51 bp, synthetic construct
  misc_feature 1..51: note = Synthetic polynucleotide
  source 1..51: mol_type = other DNA
aaggatggctccattgtcatacacarcctagactacagtgacaatggcacg

SEQ ID NO: 4372 - DNA, 51 bp, synthetic construct
  misc_feature 1..51: note = Synthetic polynucleotide
  source 1..51: mol_type = other DNA
gcagatcacttacaaagatgtggctdtgaatattcactttctgttttcttt

SEQ ID NO: 4373 - DNA, 51 bp, synthetic construct
  misc_feature 1..51: note = Synthetic polynucleotide
  source 1..51: mol_type = other DNA
tattcactttctgttttctttccagraagtggtttggcaaaagaaaaggta

SEQ ID NO: 4374 - DNA, 51 bp, synthetic construct
  misc_feature 1..51: note = Synthetic polynucleotide
  source 1..51: mol_type = other DNA
taaaagtgaaatattttcttttaacrggtttcaggatctgataaagaaaat

SEQ ID NO: 4375 - DNA, 51 bp, synthetic construct
  misc_feature 1..51: note = Synthetic polynucleotide
  source 1..51: mol_type = other DNA
gctgctgctcaactactgccagtgcdagctggtggtcgaggagtactacga

SEQ ID NO: 4376 - DNA, 51 bp, synthetic construct
  misc_feature 1..51: note = Synthetic polynucleotide
  source 1..51: mol_type = other DNA
gagaaggcgcagctccaggacctcartgaccgcttcgccagcttcatcgag

SEQ ID NO: 4377 - DNA, 51 bp, synthetic construct
  misc_feature 1..51: note = Synthetic polynucleotide
  source 1..51: mol_type = other DNA
atatctcaagtctttgatgaagttgrtacagatcaatctggtgtcttgtct

SEQ ID NO: 4378 - DNA, 51 bp, synthetic construct
  misc_feature 1..51: note = Synthetic polynucleotide
  source 1..51: mol_type = other DNA
taaagctaacttttatttttcctatrgagaatggactctctctgattttgt

SEQ ID NO: 4379 - DNA, 51 bp, synthetic construct
  misc_feature 1..51: note = Synthetic polynucleotide
  source 1..51: mol_type = other DNA
acaagaatccatccttctccccaggrtaagtccagaaggcaagtgtgagag

SEQ ID NO: 4380 - DNA, 51 bp, synthetic construct
  misc_feature 1..51: note = Synthetic polynucleotide
  source 1..51: mol_type = other DNA
gaatgaaattttagataagctggccrggtattataactgttgaactaatac

SEQ ID NO: 4381 - DNA, 51 bp, synthetic construct
  misc_feature 1..51: note = Synthetic polynucleotide
  source 1..51: mol_type = other DNA
cagtgaggagtatgggctggtggtargtagccccctcaaccccagtctcca

SEQ ID NO: 4382 - DNA, 51 bp, synthetic construct
  misc_feature 1..51: note = Synthetic polynucleotide
  source 1..51: mol_type = other DNA
attttgcaaactcgtaatttctttcrggaggaggcaaaacagattcagaat

SEQ ID NO: 4383 - DNA, 51 bp, synthetic construct
  misc_feature 1..51: note = Synthetic polynucleotide
  source 1..51: mol_type = other DNA
ccagttcagctacctggaaccaggtrtggcctgcaccagccgcccatcatg

SEQ ID NO: 4384 - DNA, 51 bp, synthetic construct
  misc_feature 1..51: note = Synthetic polynucleotide
  source 1..51: mol_type = other DNA
gacgatgatgccaatggtgatgtggrtgtggaagaaagtgatgaggtgagc

SEQ ID NO: 4385 - DNA, 51 bp, synthetic construct
  misc_feature 1..51: note = Synthetic polynucleotide
  source 1..51: mol_type = other DNA
ccaacagtgaaacacagcaccttccrtggtgaggataagctcatcagcgtg

SEQ ID NO: 4386 - DNA, 51 bp, synthetic construct
  misc_feature 1..51: note = Synthetic polynucleotide
  source 1..51: mol_type = other DNA
ggctaagagctgttcctgctccaccygagaggcacagggttgagtgtcata

SEQ ID NO: 4387 - DNA, 51 bp, synthetic construct
  misc_feature 1..51: note = Synthetic polynucleotide
  source 1..51: mol_type = other DNA
ggcggagccgggccagagacggatgyctgacgggtagcctgtggggggccc

SEQ ID NO: 4388 - DNA, 51 bp, synthetic construct
  misc_feature 1..51: note = Synthetic polynucleotide
  source 1..51: mol_type = other DNA
tatttgggatagctatacaacaaatraggtagaatttcttcataattcttt

SEQ ID NO: 4389 - DNA, 51 bp, synthetic construct
  misc_feature 1..51: note = Synthetic polynucleotide
  source 1..51: mol_type = other DNA
ctgaacctagagcttcagacgccctrtggcgtccgcctcgacccaaccggc

SEQ ID NO: 4390 - DNA, 51 bp, synthetic construct
  misc_feature 1..51: note = Synthetic polynucleotide
  source 1..51: mol_type = other DNA
gggagatgaagtcaactggtatctgrtgggaatgggcaatgaaatagactt

SEQ ID NO: 4391 - DNA, 51 bp, synthetic construct
  misc_feature 1..51: note = Synthetic polynucleotide
  source 1..51: mol_type = other DNA
aatattaacaacataattattttatrgctagacagataagtttacagcagc

SEQ ID NO: 4392 - DNA, 51 bp, synthetic construct
  misc_feature 1..51: note = Synthetic polynucleotide
  source 1..51: mol_type = other DNA
tttcaaaagggcttgaatgaggagtrgctttgccacatcttgatctgctca

SEQ ID NO: 4393 - DNA, 51 bp, synthetic construct
  misc_feature 1..51: note = Synthetic polynucleotide
  source 1..51: mol_type = other DNA
ggatcttttcctgtaggtggctcgtragttggtgatcattgaaggagactt

SEQ ID NO: 4394 - DNA, 51 bp, synthetic construct
  misc_feature 1..51: note = Synthetic polynucleotide
  source 1..51: mol_type = other DNA
agagacccgtgctgagtttgctgagrgatcggtagccaagctggaaaagac

SEQ ID NO: 4395 - DNA, 51 bp, synthetic construct
  misc_feature 1..51: note = Synthetic polynucleotide
  source 1..51: mol_type = other DNA
gcattaaacacttttttccccctgcrgtgactcagcggtgttttttgaaca

SEQ ID NO: 4396 - DNA, 51 bp, synthetic construct
  misc_feature 1..51: note = Synthetic polynucleotide
  source 1..51: mol_type = other DNA
cctgttttgcagaaagggggccctgrggcagaaggtggtccacgaagtcaa

SEQ ID NO: 4397 - DNA, 51 bp, synthetic construct
  misc_feature 1..51: note = Synthetic polynucleotide
  source 1..51: mol_type = other DNA
gtgttttgttttgttgtgtttttctrgaggatttcaacaagctgtgctctg

SEQ ID NO: 4398 - DNA, 51 bp, synthetic construct
  misc_feature 1..51: note = Synthetic polynucleotide
  source 1..51: mol_type = other DNA
acccggatttgccacaaaagaaattrcaaatggaaagcctttcttcaaagg

SEQ ID NO: 4399 - DNA, 51 bp, synthetic construct
  misc_feature 1..51: note = Synthetic polynucleotide
  source 1..51: mol_type = other DNA
ggcctgtaatcctgcctgcttcatcrcacagctcctccctgtgaaaaggaa

SEQ ID NO: 4400 - DNA, 51 bp, synthetic construct
  misc_feature 1..51: note = Synthetic polynucleotide
  source 1..51: mol_type = other DNA
acttcaacggccccttctgttctacrgcaagtaagttcccctctggatggc

SEQ ID NO: 4401 - DNA, 51 bp, synthetic construct
  misc_feature 1..51: note = Synthetic polynucleotide
  source 1..51: mol_type = other DNA
gtcagcctcgtcggcaggtgtgacgycgtcaatggtcagtttgtggaccct

SEQ ID NO: 4402 - DNA, 51 bp, synthetic construct
  misc_feature 1..51: note = Synthetic polynucleotide
  source 1..51: mol_type = other DNA
ctctgaactacattgtgtcttctgcrgaacctcccaagatccacctggact

SEQ ID NO: 4403 - DNA, 51 bp, synthetic construct
  misc_feature 1..51: note = Synthetic polynucleotide
  source 1..51: mol_type = other DNA
gggccgcaggtgcgtctggcacgtcbggatggggtgggatggacccacatc

SEQ ID NO: 4404 - DNA, 51 bp, synthetic construct
  misc_feature 1..51: note = Synthetic polynucleotide
  source 1..51: mol_type = other DNA
gtggcttcttgctaaaagctgagacygaagggccaggtggaggctacagcg

SEQ ID NO: 4405 - DNA, 51 bp, synthetic construct
  misc_feature 1..51: note = Synthetic polynucleotide
  source 1..51: mol_type = other DNA
ggccacagcctagactgcgggacacrgggactcgaagctggaggcaccagc

SEQ ID NO: 4406 - DNA, 51 bp, synthetic construct
  misc_feature 1..51: note = Synthetic polynucleotide
  source 1..51: mol_type = other DNA
agcggccatccctgagggacagttcrttgatagcaggaagggggcagagaa

SEQ ID NO: 4407 - DNA, 51 bp, synthetic construct
  misc_feature 1..51: note = Synthetic polynucleotide
  source 1..51: mol_type = other DNA
ctcccctctgttcctcaccttcaggdacaagacaacctggcagatgctgag

SEQ ID NO: 4408 - DNA, 51 bp, synthetic construct
  misc_feature 1..51: note = Synthetic polynucleotide
  source 1..51: mol_type = other DNA
ccttaccccatccctgtgcccctgcrgctttgagcagctctgcatcaactt

SEQ ID NO: 4409 - DNA, 51 bp, synthetic construct
  misc_feature 1..51: note = Synthetic polynucleotide
  source 1..51: mol_type = other DNA
gtgccagggaaggatcccatggccgrttccatcttccactattaccaggtg

SEQ ID NO: 4410 - DNA, 51 bp, synthetic construct
  misc_feature 1..51: note = Synthetic polynucleotide
  source 1..51: mol_type = other DNA
ctctctatgccctttctgctcccccrggatatcctcaccactcatcccttc

SEQ ID NO: 4411 - DNA, 51 bp, synthetic construct
  misc_feature 1..51: note = Synthetic polynucleotide
  source 1..51: mol_type = other DNA
ccctcctcgctgtcctctggctcgcrggtcatggcagcgccaggcggcagg

SEQ ID NO: 4412 - DNA, 51 bp, synthetic construct
  misc_feature 1..51: note = Synthetic polynucleotide
  source 1..51: mol_type = other DNA
attacaccatcgatgggaaccaggtdtgggtgcccttttgctgaactggtt

SEQ ID NO: 4413 - DNA, 51 bp, synthetic construct
  misc_feature 1..51: note = Synthetic polynucleotide
  source 1..51: mol_type = other DNA
gatttggtttttgcccttccagtgtrtactctgaaagagcgatgcctccag

SEQ ID NO: 4414 - DNA, 51 bp, synthetic construct
  misc_feature 1..51: note = Synthetic polynucleotide
  source 1..51: mol_type = other DNA
aaatattatttttttaaatgaatccrggagctgtgcggtcttatgcattgg

SEQ ID NO: 4415 - DNA, 51 bp, synthetic construct
  misc_feature 1..51: note = Synthetic polynucleotide
  source 1..51: mol_type = other DNA
cagagcaaaccgcccagagtagaagrtggattggggcacgctgcagacgat

SEQ ID NO: 4416 - DNA, 51 bp, synthetic construct
  misc_feature 1..51: note = Synthetic polynucleotide
  source 1..51: mol_type = other DNA
gtgtctggaatttgcatcctgctgartgtcactgaattgtgttatttgcta

SEQ ID NO: 4417 - DNA, 51 bp, synthetic construct
  misc_feature 1..51: note = Synthetic polynucleotide
  misc_difference 26: note = n is a, c, g, t or u
  source 1..51: mol_type = other DNA
ttggatattctcgacacagcaggtcnagaggagtacagtgcaatgagggac

SEQ ID NO: 4418 - DNA, 51 bp, synthetic construct
  misc_feature 1..51: note = Synthetic polynucleotide
  source 1..51: mol_type = other DNA
gatcctctctctgaaatcactgagcrggagaaagattttctatggagtcac

SEQ ID NO: 4419 - DNA, 51 bp, synthetic construct
  misc_feature 1..51: note = Synthetic polynucleotide
  source 1..51: mol_type = other DNA
tgatgacattgcatacattcgaaagrccctagccttagataaaactgagca

SEQ ID NO: 4420 - DNA, 51 bp, synthetic construct
  misc_feature 1..51: note = Synthetic polynucleotide
  source 1..51: mol_type = other DNA
ttcttcatgatttaatttttttcccrgatcaggtttcattgttgctgaaat

SEQ ID NO: 4421 - DNA, 51 bp, synthetic construct
  misc_feature 1..51: note = Synthetic polynucleotide
  source 1..51: mol_type = other DNA
ttatttgtttgtttgttttgtcactrgcacggggattctaaccttagggaa

SEQ ID NO: 4422 - DNA, 51 bp, synthetic construct
  misc_feature 1..51: note = Synthetic polynucleotide
  source 1..51: mol_type = other DNA
atcttcaaccaaggcatgatctggtrggccagctgttggacagcttatcac

SEQ ID NO: 4423 - DNA, 51 bp, synthetic construct
  misc_feature 1..51: note = Synthetic polynucleotide
  source 1..51: mol_type = other DNA
caacttaacctgttaattttcttacrgggaacaagccatcaagcccacctg

SEQ ID NO: 4424 - DNA, 51 bp, synthetic construct
  misc_feature 1..51: note = Synthetic polynucleotide
  source 1..51: mol_type = other DNA
cccgtcactgaagatgttgtatgtcyacagaaggacagaagcaaaagggat

SEQ ID NO: 4425 - DNA, 51 bp, synthetic construct
  misc_feature 1..51: note = Synthetic polynucleotide
  source 1..51: mol_type = other DNA
ataatgcataacctttccctgatgcrggaaggaactgtgagctgtgcaagg

SEQ ID NO: 4426 - DNA, 51 bp, synthetic construct
  misc_feature 1..51: note = Synthetic polynucleotide
  source 1..51: mol_type = other DNA
gatgttcctgcttgtcttttgctttrgatatgagcttctgagacgtaaaat

SEQ ID NO: 4427 - DNA, 51 bp, synthetic construct
  misc_feature 1..51: note = Synthetic polynucleotide
  source 1..51: mol_type = other DNA
ggcctcacgcacttcctgatgaacgrggtcatcaagctgcagcagcagatg

SEQ ID NO: 4428 - DNA, 51 bp, synthetic construct
  misc_feature 1..51: note = Synthetic polynucleotide
  source 1..51: mol_type = other DNA
caccgctgtcccctctgctggtgacrgcacgcagtggaagcactctggaag

SEQ ID NO: 4429 - DNA, 51 bp, synthetic construct
  misc_feature 1..51: note = Synthetic polynucleotide
  source 1..51: mol_type = other DNA
tcattggcctcccttgtgcctgtgcrggaggagctgattaactcagtggtc

SEQ ID NO: 4430 - DNA, 51 bp, synthetic construct
  misc_feature 1..51: note = Synthetic polynucleotide
  source 1..51: mol_type = other DNA
ccctgaccaccctctccattaccgcdgctctggccaggctgccgcacctct

SEQ ID NO: 4431 - DNA, 51 bp, synthetic construct
  misc_feature 1..51: note = Synthetic polynucleotide
  source 1..51: mol_type = other DNA
tttgttctcactgttttctttctttrggtgaaagtcttcgaccagcgatga

SEQ ID NO: 4432 - DNA, 51 bp, synthetic construct
  misc_feature 1..51: note = Synthetic polynucleotide
  source 1..51: mol_type = other DNA
caacaacgaggcaggccgtacggtgrgctttgagaggctccgcaccctaag

SEQ ID NO: 4433 - DNA, 51 bp, synthetic construct
  misc_feature 1..51: note = Synthetic polynucleotide
  source 1..51: mol_type = other DNA
aagcttgaatgtgtcaaaaccaaacrccctcagctccacattgagagcaaa

SEQ ID NO: 4434 - DNA, 51 bp, synthetic construct
  misc_feature 1..51: note = Synthetic polynucleotide
  source 1..51: mol_type = other DNA
agcatgtattacccacgggtacaacrttaccgagagctgcttgactccttg

SEQ ID NO: 4435 - DNA, 51 bp, synthetic construct
  misc_feature 1..51: note = Synthetic polynucleotide
  source 1..51: mol_type = other DNA
catggggatttcgtggctccagagcractgtggccctatggagaggacgtg

SEQ ID NO: 4436 - DNA, 51 bp, synthetic construct
  misc_feature 1..51: note = Synthetic polynucleotide
  source 1..51: mol_type = other DNA
cgtcggtacttccgctctggagttgrgattatccgaatggcatccatttac

SEQ ID NO: 4437 - DNA, 51 bp, synthetic construct
  misc_feature 1..51: note = Synthetic polynucleotide
  source 1..51: mol_type = other DNA
actaccatccgagtctgttgcactaytggggtctcggtcaaggtcagactc

SEQ ID NO: 4438 - DNA, 51 bp, synthetic construct
  misc_feature 1..51: note = Synthetic polynucleotide
  source 1..51: mol_type = other DNA
taccaaggccagctgcccttccccarccacgccgagaagcagaagcagttc

SEQ ID NO: 4439 - DNA, 51 bp, synthetic construct
  misc_feature 1..51: note = Synthetic polynucleotide
  source 1..51: mol_type = other DNA
gggctcatgtgccaagccccagaaarggttcgtgggatggctattaaggat

SEQ ID NO: 4440 - DNA, 51 bp, synthetic construct
  misc_feature 1..51: note = Synthetic polynucleotide
  source 1..51: mol_type = other DNA
tttttatttttcctgagtagaccatrtccttaaatgtaaaaggccctggac

SEQ ID NO: 4441 - DNA, 51 bp, synthetic construct
  misc_feature 1..51: note = Synthetic polynucleotide
  source 1..51: mol_type = other DNA
ccggcggtcccacccgagctggacargcacttcttgctgtgcgaggcctgt

SEQ ID NO: 4442 - DNA, 51 bp, synthetic construct
  misc_feature 1..51: note = Synthetic polynucleotide
  source 1..51: mol_type = other DNA
aaggccatgccctccagcaccttcaycaggaaatcgtcctctaccagccca

SEQ ID NO: 4443 - DNA, 51 bp, synthetic construct
  misc_feature 1..51: note = Synthetic polynucleotide
  source 1..51: mol_type = other DNA
tacatgtaattgtggaacacaggcgycctcttgctcagccggtccacatac

SEQ ID NO: 4444 - DNA, 51 bp, synthetic construct
  misc_feature 1..51: note = Synthetic polynucleotide
  source 1..51: mol_type = other DNA
gttccatccccaaaaggaggctgaaratcagcacaataagatcctatatcg

SEQ ID NO: 4445 - DNA, 51 bp, synthetic construct
  misc_feature 1..51: note = Synthetic polynucleotide
  source 1..51: mol_type = other DNA
aaaataaactattttctttcctcccvgggtcgtcagacaccaaaacatatt

SEQ ID NO: 4446 - DNA, 51 bp, synthetic construct
  misc_feature 1..51: note = Synthetic polynucleotide
  source 1..51: mol_type = other DNA
atgtaatataaaataattgtttcctrggcacaataaaagatcgaagattgt

SEQ ID NO: 4447 - DNA, 51 bp, synthetic construct
  misc_feature 1..51: note = Synthetic polynucleotide
  source 1..51: mol_type = other DNA
aacttatatattttctccccattgcdgcacaactaaggaacgtcaagagat

SEQ ID NO: 4448 - DNA, 51 bp, synthetic construct
  misc_feature 1..51: note = Synthetic polynucleotide
  source 1..51: mol_type = other DNA
gataatattctacttttatttgttcrgggctctgtgtgacactccaggtgt

SEQ ID NO: 4449 - DNA, 51 bp, synthetic construct
  misc_feature 1..51: note = Synthetic polynucleotide
  source 1..51: mol_type = other DNA
agcagacccagcttaccttgaggtgrgagagtaagaggacatataatgagg

SEQ ID NO: 4450 - DNA, 51 bp, synthetic construct
  misc_feature 1..51: note = Synthetic polynucleotide
  source 1..51: mol_type = other DNA
gttgaatttttgttttgttttctgtrggtttcagatgaaattttatttcag

SEQ ID NO: 4451 - DNA, 51 bp, synthetic construct
  misc_feature 1..51: note = Synthetic polynucleotide
  source 1..51: mol_type = other DNA
taggctacgttttcatttttttatcrgatgtcttctcctaattgtgagata

SEQ ID NO: 4452 - DNA, 51 bp, synthetic construct
  misc_feature 1..51: note = Synthetic polynucleotide
  source 1..51: mol_type = other DNA
aaggtgcagcagaagcagaggcagargcacttcaaccggcagatcccggcg

SEQ ID NO: 4453 - DNA, 51 bp, synthetic construct
  misc_feature 1..51: note = Synthetic polynucleotide
  source 1..51: mol_type = other DNA
tcgacgcatgcagtactttgtggccvagaagaaattccaggtaagccctgt

SEQ ID NO: 4454 - DNA, 51 bp, synthetic construct
  misc_feature 1..51: note = Synthetic polynucleotide
  source 1..51: mol_type = other DNA
cgcacccacgtccagggccgcgtctrcaacttcctcgagcgtcccaccggc

SEQ ID NO: 4455 - DNA, 51 bp, synthetic construct
  misc_feature 1..51: note = Synthetic polynucleotide
  source 1..51: mol_type = other DNA
ctcctgggctccgtggtcttcatccvccgccaggtgggtggcccgggttag

SEQ ID NO: 4456 - DNA, 51 bp, synthetic construct
  misc_feature 1..51: note = Synthetic polynucleotide
  misc_difference 26: note = n is a, c, g, t or u
  source 1..51: mol_type = other DNA
caggtcacagtcaccaccatcggctntggggacaaggtgccccagacgtgg

SEQ ID NO: 4457 - DNA, 51 bp, synthetic construct
  misc_feature 1..51: note = Synthetic polynucleotide
  source 1..51: mol_type = other DNA
cctaataatgatgggttttatttccrgacttcacttctaatggtgattatg

SEQ ID NO: 4458 - DNA, 51 bp, synthetic construct
  misc_feature 1..51: note = Synthetic polynucleotide
  source 1..51: mol_type = other DNA
acagaaaaagaaatatttgaaaggtvtgttctttgaataccttacttataa

SEQ ID NO: 4459 - DNA, 51 bp, synthetic construct
  misc_feature 1..51: note = Synthetic polynucleotide
  source 1..51: mol_type = other DNA
cagggaccccagcgcccgagagaccrtgcagaggtcgcctctggaaaaggc

SEQ ID NO: 4460 - DNA, 51 bp, synthetic construct
  misc_feature 1..51: note = Synthetic polynucleotide
  source 1..51: mol_type = other DNA
accaacatgttttctttgatcttacdgttgttattaattgtgattggagct

SEQ ID NO: 4461 - DNA, 51 bp, synthetic construct
  misc_feature 1..51: note = Synthetic polynucleotide
  misc_difference 26: note = n is a, c, g, t or u
  source 1..51: mol_type = other DNA
acaacctgaacaaatttgatgaagtntgtacctattgatttaatcttttag

SEQ ID NO: 4462 - DNA, 51 bp, synthetic construct
  misc_feature 1..51: note = Synthetic polynucleotide
  source 1..51: mol_type = other DNA
gaacctgtctccacaaagtgtgaccrcatattttgcaagtaagtttgaatg

SEQ ID NO: 4463 - DNA, 51 bp, synthetic construct
  misc_feature 1..51: note = Synthetic polynucleotide
  source 1..51: mol_type = other DNA
ttaaagttcattggaacagaaagaartggatttatctgctcttcgcgttga

SEQ ID NO: 4464 - DNA, 51 bp, synthetic construct
  misc_feature 1..51: note = Synthetic polynucleotide
  source 1..51: mol_type = other DNA
tgtaagaatgatataaccaaaaggtrtataatttggtaatgatgctaggtt

SEQ ID NO: 4465 - DNA, 51 bp, synthetic construct
  misc_feature 1..51: note = Synthetic polynucleotide
  source 1..51: mol_type = other DNA
tctgaacctctgtttttgttatttavggtgaagcagcatctgggtgtgaga

SEQ ID NO: 4466 - DNA, 51 bp, synthetic construct
  misc_feature 1..51: note = Synthetic polynucleotide
  source 1..51: mol_type = other DNA
gttttctccttccatttatctttctrggtcatccccttctaaatgcccatc

SEQ ID NO: 4467 - DNA, 51 bp, synthetic construct
  misc_feature 1..51: note = Synthetic polynucleotide
  source 1..51: mol_type = other DNA
ataatggaatatttgatttaatttcrgatgctcgtgtacaagtttgccaga

SEQ ID NO: 4468 - DNA, 51 bp, synthetic construct
  misc_feature 1..51: note = Synthetic polynucleotide
  source 1..51: mol_type = other DNA
aactaatctaattactgaagagactrctcatgttgttatgaaaacaggtat

SEQ ID NO: 4469 - DNA, 51 bp, synthetic construct
  misc_feature 1..51: note = Synthetic polynucleotide
  source 1..51: mol_type = other DNA
aatgctctttccttcctggggatccdgggtgtccacccaattgtggttgtg

SEQ ID NO: 4470 - DNA, 51 bp, synthetic construct
  misc_feature 1..51: note = Synthetic polynucleotide
  source 1..51: mol_type = other DNA
cgctaccgtgctcaaggagcagctcragctctgcctggccgccgagggctt

SEQ ID NO: 4471 - DNA, 51 bp, synthetic construct
  misc_feature 1..51: note = Synthetic polynucleotide
  source 1..51: mol_type = other DNA
cggcagctggcggctgctgaggacgrgaagaagacgctgaactcgctgctg

SEQ ID NO: 4472 - DNA, 51 bp, synthetic construct
  misc_feature 1..51: note = Synthetic polynucleotide
  source 1..51: mol_type = other DNA
catcgtgtgcgtcatgggcccggtgrgcgccccgcgccgggaccctcccca

SEQ ID NO: 4473 - DNA, 51 bp, synthetic construct
  misc_feature 1..51: note = Synthetic polynucleotide
  source 1..51: mol_type = other DNA
aggagcacgctcagcaaggcatgaghtgcacaagagttgggtatcagctgt

SEQ ID NO: 4474 - DNA, 51 bp, synthetic construct
  misc_feature 1..51: note = Synthetic polynucleotide
  source 1..51: mol_type = other DNA
aggaatcattggatgtatatgagtargtaggtttgttaaagcaaaagaagt

SEQ ID NO: 4475 - DNA, 51 bp, synthetic construct
  misc_feature 1..51: note = Synthetic polynucleotide
  source 1..51: mol_type = other DNA
gcttcgctcactccgctctcttcccrggtgcacgtcggcgacgaggacttc

SEQ ID NO: 4476 - DNA, 51 bp, synthetic construct
  misc_feature 1..51: note = Synthetic polynucleotide
  source 1..51: mol_type = other DNA
ttaaaatctaggtatgaatttttcartgagctttatcatcgcttcttgctc

SEQ ID NO: 4477 - DNA, 51 bp, synthetic construct
  misc_feature 1..51: note = Synthetic polynucleotide
  source 1..51: mol_type = other DNA
cttaaaaaaaaaaaaaaaaaaaaaarccttttcaggagggcctgaggctat

SEQ ID NO: 4478 - DNA, 51 bp, synthetic construct
  misc_feature 1..51: note = Synthetic polynucleotide
  source 1..51: mol_type = other DNA
ttccagaaaatagttcacaaccctgdtgtgattacctatgacactgaattt

SEQ ID NO: 4479 - DNA, 51 bp, synthetic construct
  misc_feature 1..51: note = Synthetic polynucleotide
  source 1..51: mol_type = other DNA
gcatagaacaacgtttgggaaagtarcaaaaaattcttcttcgattaaagt

SEQ ID NO: 4480 - DNA, 51 bp, synthetic construct
  misc_feature 1..51: note = Synthetic polynucleotide
  source 1..51: mol_type = other DNA
ctgagtgtgcgatggaccctgttacrgaaaccagccctgagcaaaggggtt

SEQ ID NO: 4481 - DNA, 51 bp, synthetic construct
  misc_feature 1..51: note = Synthetic polynucleotide
  source 1..51: mol_type = other DNA
aaacacaagcaccaccttatcgagcrctcaaggcttcactcgggcgagaag

SEQ ID NO: 4482 - DNA, 51 bp, synthetic construct
  misc_feature 1..51: note = Synthetic polynucleotide
  source 1..51: mol_type = other DNA
ccaactggacatttccgagccatacraagtttaccgaattgttcctgagga

SEQ ID NO: 4483 - DNA, 51 bp, synthetic construct
  misc_feature 1..51: note = Synthetic polynucleotide
  source 1..51: mol_type = other DNA
caaagctgaaccagccacttggaagrcgaggttacgctgtgctttgaataa

SEQ ID NO: 4484 - DNA, 51 bp, synthetic construct
  misc_feature 1..51: note = Synthetic polynucleotide
  source 1..51: mol_type = other DNA
tgtcccggcctgcagagcttggactrtgacaacagtgagaaccagctgttc

SEQ ID NO: 4485 - DNA, 51 bp, synthetic construct
  misc_feature 1..51: note = Synthetic polynucleotide
  source 1..51: mol_type = other DNA
agagaaggcagtggactctctagtgragaagttaaagaagaagaagggagc

SEQ ID NO: 4486 - DNA, 51 bp, synthetic construct
  misc_feature 1..51: note = Synthetic polynucleotide
  source 1..51: mol_type = other DNA
tggaccttcttccaggcctactactrctgcttcatcaccctcaccaccatc

SEQ ID NO: 4487 - DNA, 51 bp, synthetic construct
  misc_feature 1..51: note = Synthetic polynucleotide
  source 1..51: mol_type = other DNA
cgccacgcccgccgcagcagcttcayggcgcccgcgccgggccggcggccc

SEQ ID NO: 4488 - DNA, 51 bp, synthetic construct
  misc_feature 1..51: note = Synthetic polynucleotide
  source 1..51: mol_type = other DNA
cggcgctcggcggcgcggggcgcgcyggccaccagcactgccaggaaggcg

SEQ ID NO: 4489 - DNA, 51 bp, synthetic construct
  misc_feature 1..51: note = Synthetic polynucleotide
  source 1..51: mol_type = other DNA
cgggccagaccagcgagcccaaaagragggggacattatccttggggggct

SEQ ID NO: 4490 - DNA, 51 bp, synthetic construct
  misc_feature 1..51: note = Synthetic polynucleotide
  source 1..51: mol_type = other DNA
gggaccctgctctccctctctgaacrgggtgagcatctcgctctactcctc

SEQ ID NO: 4491 - DNA, 51 bp, synthetic construct
  misc_feature 1..51: note = Synthetic polynucleotide
  source 1..51: mol_type = other DNA
gagatcactgaacttggtgactccayactgagctgtgccacggtccagggc

SEQ ID NO: 4492 - DNA, 51 bp, synthetic construct
  misc_feature 1..51: note = Synthetic polynucleotide
  source 1..51: mol_type = other DNA
ggcagccgggcccgtgccagccaaarcggcggcgggcgggagccccgcaag

SEQ ID NO: 4493 - DNA, 51 bp, synthetic construct
  misc_feature 1..51: note = Synthetic polynucleotide
  source 1..51: mol_type = other DNA
gggcagcactgggatgctccagggcygtcggaccttcgagtggggcagggg

SEQ ID NO: 4494 - DNA, 51 bp, synthetic construct
  misc_feature 1..51: note = Synthetic polynucleotide
  source 1..51: mol_type = other DNA
gaacttggccctggtgtcttggaacrgcccacagtggtggtgggcaagggc

SEQ ID NO: 4495 - DNA, 51 bp, synthetic construct
  misc_feature 1..51: note = Synthetic polynucleotide
  source 1..51: mol_type = other DNA
aagctctacaacccagagaacatctrcctgtcggaacatggaggaggagct

SEQ ID NO: 4496 - DNA, 51 bp, synthetic construct
  misc_feature 1..51: note = Synthetic polynucleotide
  source 1..51: mol_type = other DNA
acctttttagggggtgatggtgggartgggacaaaaagacagctacgtggg

SEQ ID NO: 4497 - DNA, 51 bp, synthetic construct
  misc_feature 1..51: note = Synthetic polynucleotide
  source 1..51: mol_type = other DNA
agctacaatgattttgggaattacarcaatcagtcttcaaattttggaccc

SEQ ID NO: 4498 - DNA, 51 bp, synthetic construct
  misc_feature 1..51: note = Synthetic polynucleotide
  source 1..51: mol_type = other DNA
cttaatagttagcattgggagaacayagatcaccttgtatgatgttaaagg

SEQ ID NO: 4499 - DNA, 51 bp, synthetic construct
  misc_feature 1..51: note = Synthetic polynucleotide
  source 1..51: mol_type = other DNA
ctaacccgctatccccttgcagctcracaacaacacaacgcagggccaggc

SEQ ID NO: 4500 - DNA, 51 bp, synthetic construct
  misc_feature 1..51: note = Synthetic polynucleotide
  source 1..51: mol_type = other DNA
ataattcttctcaccctaacaggtcracctcgcttccccacccttactaac

SEQ ID NO: 4501 - DNA, 51 bp, synthetic construct
  misc_feature 1..51: note = Synthetic polynucleotide
  source 1..51: mol_type = other DNA
gggaaggcttctgttcaagcgatcartgtttttcatcctgctgtaagtgac

SEQ ID NO: 4502 - DNA, 51 bp, synthetic construct
  misc_feature 1..51: note = Synthetic polynucleotide
  misc_difference 26: note = n is a, c, g, t or u
  source 1..51: mol_type = other DNA
ccagcagtgggggctcgcggacgtgnagggccactggtccccaacaatgtg

SEQ ID NO: 4503 - DNA, 51 bp, synthetic construct
  misc_feature 1..51: note = Synthetic polynucleotide
  source 1..51: mol_type = other DNA
tcctgcaccgagagagatggaataargcccttgaaccagccctgctgtgcc

SEQ ID NO: 4504 - DNA, 51 bp, synthetic construct
  misc_feature 1..51: note = Synthetic polynucleotide
  source 1..51: mol_type = other DNA
ctgcgcgcccgggatttcgatctggrcctggcctggcgggtaagcgtgcgt

SEQ ID NO: 4505 - DNA, 51 bp, synthetic construct
  misc_feature 1..51: note = Synthetic polynucleotide
  source 1..51: mol_type = other DNA
aaacctttacgtgtcaagaagctctrtgtactgtcagccttacttatagag

SEQ ID NO: 4506 - DNA, 51 bp, synthetic construct
  misc_feature 1..51: note = Synthetic polynucleotide
  source 1..51: mol_type = other DNA
gtatatgacgaagattcaccttatcraaatataaaaattctacactcgaag

SEQ ID NO: 4507 - DNA, 51 bp, synthetic construct
  misc_feature 1..51: note = Synthetic polynucleotide
  source 1..51: mol_type = other DNA
aaaatacaatacaataaagtagtaarggcccaactatggatatatttgaga

SEQ ID NO: 4508 - DNA, 51 bp, synthetic construct
  misc_feature 1..51: note = Synthetic polynucleotide
  source 1..51: mol_type = other DNA
tgggccctgtaccacctctcaaaggrccctgagatccaggaggccttgcac

SEQ ID NO: 4509 - DNA, 51 bp, synthetic construct
  misc_feature 1..51: note = Synthetic polynucleotide
  source 1..51: mol_type = other DNA
tcactctatgccaccttcctccccargtggactcgccccgtgctgcctttc

SEQ ID NO: 4510 - DNA, 51 bp, synthetic construct
  misc_feature 1..51: note = Synthetic polynucleotide
  source 1..51: mol_type = other DNA
atcccaactatcgggcggctgcgcargagggcagggaaggtggtgtccgag

SEQ ID NO: 4511 - DNA, 51 bp, synthetic construct
  misc_feature 1..51: note = Synthetic polynucleotide
  source 1..51: mol_type = other DNA
ctacctgtacaccgtggtggccttcracttcttccgcaagttctacaacaa

SEQ ID NO: 4512 - DNA, 51 bp, synthetic construct
  misc_feature 1..51: note = Synthetic polynucleotide
  source 1..51: mol_type = other DNA
cgcgggtgacgaatacgagctctacrgggtggtcttcgacatcaccttctt

SEQ ID NO: 4513 - DNA, 51 bp, synthetic construct
  misc_feature 1..51: note = Synthetic polynucleotide
  source 1..51: mol_type = other DNA
gccttcaacttcttccgcaagttctrcaacaagagcgaggatgaggatgaa

SEQ ID NO: 4514 - DNA, 51 bp, synthetic construct
  misc_feature 1..51: note = Synthetic polynucleotide
  source 1..51: mol_type = other DNA
gatcgaatagaagtgacaaggctcartgggaccatgaggaagatcttgatt

SEQ ID NO: 4515 - DNA, 51 bp, synthetic construct
  misc_feature 1..51: note = Synthetic polynucleotide
  source 1..51: mol_type = other DNA
gttataaacgaaaagttgatgaacartcatcagctggaactggcaaagcag

SEQ ID NO: 4516 - DNA, 51 bp, synthetic construct
  misc_feature 1..51: note = Synthetic polynucleotide
  source 1..51: mol_type = other DNA
cagggtgacttttctttgcacccacrgataatagaggagttggcagatgcc

SEQ ID NO: 4517 - DNA, 51 bp, synthetic construct
  misc_feature 1..51: note = Synthetic polynucleotide
  source 1..51: mol_type = other DNA
aattgtaccaggttacagcagctggrcatattaggtaaggttacaatatat

SEQ ID NO: 4518 - DNA, 51 bp, synthetic construct
  misc_feature 1..51: note = Synthetic polynucleotide
  source 1..51: mol_type = other DNA
gccgactaccagcccaccgagcaggrcatcctccgaaccagggtcaaaacc

SEQ ID NO: 4519 - DNA, 51 bp, synthetic construct
  misc_feature 1..51: note = Synthetic polynucleotide
  source 1..51: mol_type = other DNA
gacctgggttccccctctcctgcagracgattccctgatgaggcagatgcg

SEQ ID NO: 4520 - DNA, 51 bp, synthetic construct
  misc_feature 1..51: note = Synthetic polynucleotide
  source 1..51: mol_type = other DNA
gggttctgaggtccataccaagaagrcggtgatgatcaagaccatcgagac

SEQ ID NO: 4521 - DNA, 51 bp, synthetic construct
  misc_feature 1..51: note = Synthetic polynucleotide
  source 1..51: mol_type = other DNA
tccttaagaaagtgcatgaagaggtrtaccttggcccctcttcctggggtc

SEQ ID NO: 4522 - DNA, 51 bp, synthetic construct
  misc_feature 1..51: note = Synthetic polynucleotide
  source 1..51: mol_type = other DNA
gccctggacatcgagatcgccacctrcaggaagctgctagagggcgaggag

SEQ ID NO: 4523 - DNA, 51 bp, synthetic construct
  misc_feature 1..51: note = Synthetic polynucleotide
  source 1..51: mol_type = other DNA
atcgccacctacaggaagctgctagdgggcgaggagaaccggtgagccctc

SEQ ID NO: 4524 - DNA, 51 bp, synthetic construct
  misc_feature 1..51: note = Synthetic polynucleotide
  source 1..51: mol_type = other DNA
tacaggaagctgctagagggcgaggrgaaccggtgagccctcatcacagcc

SEQ ID NO: 4525 - DNA, 51 bp, synthetic construct
  misc_feature 1..51: note = Synthetic polynucleotide
  source 1..51: mol_type = other DNA
gagcgggcagagatgatggagctcartgaccgctttgccagctacatcgag

SEQ ID NO: 4526 - DNA, 51 bp, synthetic construct
  misc_feature 1..51: note = Synthetic polynucleotide
  source 1..51: mol_type = other DNA
aacatgcatgaagccgaagagtggtrccgctccaaggtagccctgcctgtg

SEQ ID NO: 4527 - DNA, 51 bp, synthetic construct
  misc_feature 1..51: note = Synthetic polynucleotide
  source 1..51: mol_type = other DNA
caacgcggagctgctccgccaggccragcacgaagccaacgactaccggcg

SEQ ID NO: 4528 - DNA, 51 bp, synthetic construct
  misc_feature 1..51: note = Synthetic polynucleotide
  source 1..51: mol_type = other DNA
ggagcgtgaacagatcaagaccctcdacaacaagtttgcctccttcatcga

SEQ ID NO: 4529 - DNA, 51 bp, synthetic construct
  misc_feature 1..51: note = Synthetic polynucleotide
  source 1..51: mol_type = other DNA
gagcgtgaacagatcaagaccctcavcaacaagtttgcctccttcatcgac

SEQ ID NO: 4530 - DNA, 51 bp, synthetic construct
  misc_feature 1..51: note = Synthetic polynucleotide
  source 1..51: mol_type = other DNA
tgagaaggtgaccatgcagaacctcratgaccgcctggcctcctacctgga

SEQ ID NO: 4531 - DNA, 51 bp, synthetic construct
  misc_feature 1..51: note = Synthetic polynucleotide
  source 1..51: mol_type = other DNA
ttttggtttctgtgtccttcctccavcccttccaggagctgcgtgagacca

SEQ ID NO: 4532 - DNA, 51 bp, synthetic construct
  misc_feature 1..51: note = Synthetic polynucleotide
  source 1..51: mol_type = other DNA
gcggctgcgctttgcccggaagcccrtttccatcatcggtgagtcatgcct

SEQ ID NO: 4533 - DNA, 51 bp, synthetic construct
  misc_feature 1..51: note = Synthetic polynucleotide
  source 1..51: mol_type = other DNA
catggtggtcctctgcgtgggctccraggggcaggtgtttgccacgtcggc

SEQ ID NO: 4534 - DNA, 51 bp, synthetic construct
  misc_feature 1..51: note = Synthetic polynucleotide
  source 1..51: mol_type = other DNA
cctgtacatcggcttcctgggcctcrtcttctcctcgtactttgtgtacct

SEQ ID NO: 4535 - DNA, 51 bp, synthetic construct
  misc_feature 1..51: note = Synthetic polynucleotide
  source 1..51: mol_type = other DNA
atctacacggctgtcttcacaccctvctcggctgccttcctgctgaaggag

SEQ ID NO: 4536 - DNA, 51 bp, synthetic construct
  misc_feature 1..51: note = Synthetic polynucleotide
  misc_difference 26: note = n is a, c, g, t or u
  source 1..51: mol_type = other DNA
caccccggccgcatcgccgtccactncttcaagggctggttcctcatcgac

SEQ ID NO: 4537 - DNA, 51 bp, synthetic construct
  misc_feature 1..51: note = Synthetic polynucleotide
  source 1..51: mol_type = other DNA
atgtgcacctttgcgctcatcgcgcvctggctagcctgcatctggtacgcc

SEQ ID NO: 4538 - DNA, 51 bp, synthetic construct
  misc_feature 1..51: note = Synthetic polynucleotide
  source 1..51: mol_type = other DNA
ctggctagcctgcatctggtacgccvtcggcaacatggagcagccacacat

SEQ ID NO: 4539 - DNA, 51 bp, synthetic construct
  misc_feature 1..51: note = Synthetic polynucleotide
  source 1..51: mol_type = other DNA
ctgcatctggtacgccatcggcaacvtggagcagccacacatggactcacg

SEQ ID NO: 4540 - DNA, 51 bp, synthetic construct
  misc_feature 1..51: note = Synthetic polynucleotide
  source 1..51: mol_type = other DNA
gagctgtgcggctactcgcgggccgvggtgatgcagcgaccctgcacctgc

SEQ ID NO: 4541 - DNA, 51 bp, synthetic construct
  misc_feature 1..51: note = Synthetic polynucleotide
  misc_difference 26: note = n is a, c, g, t or u
  source 1..51: mol_type = other DNA
agcctcaccagtgtgggcttcggcancgtctctcccaacaccaactcagag

SEQ ID NO: 4542 - DNA, 51 bp, synthetic construct
  misc_feature 1..51: note = Synthetic polynucleotide
  source 1..51: mol_type = other DNA
gtgggcttcggcaacgtctctcccadcaccaactcagagaagatcttctcc

SEQ ID NO: 4543 - DNA, 51 bp, synthetic construct
  misc_feature 1..51: note = Synthetic polynucleotide
  source 1..51: mol_type = other DNA
agagaagatcttctccatctgcgtcdtgctcattggctgtgagtgtgccca

SEQ ID NO: 4544 - DNA, 51 bp, synthetic construct
  misc_feature 1..51: note = Synthetic polynucleotide
  source 1..51: mol_type = other DNA
gcacgcctggtcctacaccaacggcrtcgacatgaacgcggtgaggccacc

SEQ ID NO: 4545 - DNA, 51 bp, synthetic construct
  misc_feature 1..51: note = Synthetic polynucleotide
  source 1..51: mol_type = other DNA
caaagtggaaatcgccttctaccggdaagatggtaggagcgggccggggcg

SEQ ID NO: 4546 - DNA, 51 bp, synthetic construct
  misc_feature 1..51: note = Synthetic polynucleotide
  source 1..51: mol_type = other DNA
tcggcggccccggggcgacgtggagrgcaggctggatgccctccagcgcca

SEQ ID NO: 4547 - DNA, 51 bp, synthetic construct
  misc_feature 1..51: note = Synthetic polynucleotide
  source 1..51: mol_type = other DNA
catactggaaggcatggtggaagccvctgccatgacgacacagtgccgtag

SEQ ID NO: 4548 - DNA, 51 bp, synthetic construct
  misc_feature 1..51: note = Synthetic polynucleotide
  source 1..51: mol_type = other DNA
cagtacattgtagaggactggcaggraaagtacaagagccaaatcttgaat

SEQ ID NO: 4549 - DNA, 51 bp, synthetic construct
  misc_feature 1..51: note = Synthetic polynucleotide
  source 1..51: mol_type = other DNA
aaaggatatgagtgaaccagaatctycacagccgctctccggatggggtgg

SEQ ID NO: 4550 - DNA, 51 bp, synthetic construct
  misc_feature 1..51: note = Synthetic polynucleotide
  source 1..51: mol_type = other DNA
tgccctggtgggcgccatcccgtccrtcatgaacgtcctcctcgtctgcct

SEQ ID NO: 4551 - DNA, 51 bp, synthetic construct
  misc_feature 1..51: note = Synthetic polynucleotide
  source 1..51: mol_type = other DNA
atcttcatgacagaggagcagaagargtactacaatgccatgaagaagctg

SEQ ID NO: 4552 - DNA, 51 bp, synthetic construct
  misc_feature 1..51: note = Synthetic polynucleotide
  source 1..51: mol_type = other DNA
gatgtccctgcctgccctcttcaacrtcgggctgctgctcttcctcgtcat

SEQ ID NO: 4553 - DNA, 51 bp, synthetic construct
  misc_feature 1..51: note = Synthetic polynucleotide
  source 1..51: mol_type = other DNA
ccgagtcctccgggccctgaaaactrtatcagtcatttcaggtgaaaatca

SEQ ID NO: 4554 - DNA, 51 bp, synthetic construct
  misc_feature 1..51: note = Synthetic polynucleotide
  source 1..51: mol_type = other DNA
ttctggagggtgctgttcaaggactrcaacctggagcgctatggccggctg

SEQ ID NO: 4555 - DNA, 51 bp, synthetic construct
  misc_feature 1..51: note = Synthetic polynucleotide
  source 1..51: mol_type = other DNA
acgcaacagcaacctgagtcagaccrgtaggtcatcccggatgctggcagt

SEQ ID NO: 4556 - DNA, 51 bp, synthetic construct
  misc_feature 1..51: note = Synthetic polynucleotide
  source 1..51: mol_type = other DNA
gaagaaagtctgtacatgtatctttrctttgttattttcatcatctttggg

SEQ ID NO: 4557 - DNA, 51 bp, synthetic construct
  misc_feature 1..51: note = Synthetic polynucleotide
  source 1..51: mol_type = other DNA
tgtttcctctctcgccccacggagaraaccatcttcatcatcttcatgctg

SEQ ID NO: 4558 - DNA, 51 bp, synthetic construct
  misc_feature 1..51: note = Synthetic polynucleotide
  source 1..51: mol_type = other DNA
agctgtgtctttgtgtttgtgctgcrggtgggcaagtgggagaaccatacg

SEQ ID NO: 4559 - DNA, 51 bp, synthetic construct
  misc_feature 1..51: note = Synthetic polynucleotide
  source 1..51: mol_type = other DNA
ggagagttttgaggcctgtggttgaratggaaatatcttcacagaaaaact

SEQ ID NO: 4560 - DNA, 51 bp, synthetic construct
  misc_feature 1..51: note = Synthetic polynucleotide
  source 1..51: mol_type = other DNA
aatctgacagaagcactgtcgctctvtgaagaacagctggggcgcctgtat

SEQ ID NO: 4561 - DNA, 51 bp, synthetic construct
  misc_feature 1..51: note = Synthetic polynucleotide
  source 1..51: mol_type = other DNA
caagagagtgccaaccttctgtttcrgatacctgggctatatgtgtgacct

SEQ ID NO: 4562 - DNA, 51 bp, synthetic construct
  misc_feature 1..51: note = Synthetic polynucleotide
  source 1..51: mol_type = other DNA
gtccaggttcgctgcaaaccagaccrtggatactggagtgcatggagtcca

SEQ ID NO: 4563 - DNA, 51 bp, synthetic construct
  misc_feature 1..51: note = Synthetic polynucleotide
  source 1..51: mol_type = other DNA
ttggcttcaagattttgtgccaaccrggtaaaatgttcttttctatttttt

SEQ ID NO: 4564 - DNA, 51 bp, synthetic construct
  misc_feature 1..51: note = Synthetic polynucleotide
  source 1..51: mol_type = other DNA
aaagaccttttcctccctcattcacrggctggcttattagctgtaatggcc

SEQ ID NO: 4565 - DNA, 51 bp, synthetic construct
  misc_feature 1..51: note = Synthetic polynucleotide
  source 1..51: mol_type = other DNA
aatgctatcaaagagatgattgagarctggtacggagggagtcgagccggg

SEQ ID NO: 4566 - DNA, 51 bp, synthetic construct
  misc_feature 1..51: note = Synthetic polynucleotide
  source 1..51: mol_type = other DNA
ttttctgtttgatttgccagtttagrtgcaaaatccacaagtattcaagtg

SEQ ID NO: 4567 - DNA, 51 bp, synthetic construct
  misc_feature 1..51: note = Synthetic polynucleotide
  misc_difference 26: note = n is a, c, g, t or u
  source 1..51: mol_type = other DNA
tttttggttttattttttgttttgcngttctccgggagatgttgcataacc

SEQ ID NO: 4568 - DNA, 51 bp, synthetic construct
  misc_feature 1..51: note = Synthetic polynucleotide
  source 1..51: mol_type = other DNA
ttgaggtattgaatttctttggaccrggtgaattgggacgaagaaaaggaa

SEQ ID NO: 4569 - DNA, 51 bp, synthetic construct
  misc_feature 1..51: note = Synthetic polynucleotide
  source 1..51: mol_type = other DNA
tttactcatctttttggtatctaacvgaaagaagatctggatattgtatgt

SEQ ID NO: 4570 - DNA, 51 bp, synthetic construct
  misc_feature 1..51: note = Synthetic polynucleotide
  source 1..51: mol_type = other DNA
tgggaaaattttggaagttgttggcrggtacagtccaaaatctgggagtgg

SEQ ID NO: 4571 - DNA, 51 bp, synthetic construct
  misc_feature 1..51: note = Synthetic polynucleotide
  source 1..51: mol_type = other DNA
aaaattttggaagttgttggcaggtrcagtccaaaatctgggagtgggtct

SEQ ID NO: 4572 - DNA, 51 bp, synthetic construct
  misc_feature 1..51: note = Synthetic polynucleotide
  source 1..51: mol_type = other DNA
tcttactcttttgtttttcttttccvggtattcagtacacaatgcaggcat

SEQ ID NO: 4573 - DNA, 51 bp, synthetic construct
  misc_feature 1..51: note = Synthetic polynucleotide
  source 1..51: mol_type = other DNA
ttgtgtcttctgctgtttgtttatcrgcaaggagagacagtagctgatgtt

SEQ ID NO: 4574 - DNA, 51 bp, synthetic construct
  misc_feature 1..51: note = Synthetic polynucleotide
  source 1..51: mol_type = other DNA
gatttttttatataggttatcgacabaccgactaacagcatttccaaagat

SEQ ID NO: 4575 - DNA, 51 bp, synthetic construct
  misc_feature 1..51: note = Synthetic polynucleotide
  source 1..51: mol_type = other DNA
actggttgctttctttttattgtttrgatcgtctggtagaatcaacttcct

SEQ ID NO: 4576 - DNA, 51 bp, synthetic construct
  misc_feature 1..51: note = Synthetic polynucleotide
  source 1..51: mol_type = other DNA
aaacacacacccattcctgtacctcvggtaatgtagcaccaaactcctcaa

SEQ ID NO: 4577 - DNA, 51 bp, synthetic construct
  misc_feature 1..51: note = Synthetic polynucleotide
  source 1..51: mol_type = other DNA
cacacccattcctgtacctcaggtartgtagcaccaaactcctcaaccaag

SEQ ID NO: 4578 - DNA, 51 bp, synthetic construct
  misc_feature 1..51: note = Synthetic polynucleotide
  source 1..51: mol_type = other DNA
tttgtttgttttactactttcttttvggaaaacaccagaaattattgttgg

SEQ ID NO: 4579 - DNA, 51 bp, synthetic construct
  misc_feature 1..51: note = Synthetic polynucleotide
  source 1..51: mol_type = other DNA
ctttttcttttcttcttgattatcarggcttggaccctggcaaacagatta

SEQ ID NO: 4580 - DNA, 51 bp, synthetic construct
  misc_feature 1..51: note = Synthetic polynucleotide
  misc_difference 26: note = n is a, c, g, t or u
  source 1..51: mol_type = other DNA
gaagaatggtgttaaatttaccaacnggtttgcaagtcgttattatatttt

SEQ ID NO: 4581 - DNA, 51 bp, synthetic construct
  misc_feature 1..51: note = Synthetic polynucleotide
  source 1..51: mol_type = other DNA
ccgaggcggatcgggtgttgcatccdtggagcgagctgagagctcgaggtg

SEQ ID NO: 4582 - DNA, 51 bp, synthetic construct
  misc_feature 1..51: note = Synthetic polynucleotide
  source 1..51: mol_type = other DNA
ataaatatgttttcttttttgccttrgaatgcgttgatatcaatgttactc

SEQ ID NO: 4583 - DNA, 51 bp, synthetic construct
  misc_feature 1..51: note = Synthetic polynucleotide
  source 1..51: mol_type = other DNA
taagggatttgctttgttttattttrgtcctgttgttctacaatgtacaca

SEQ ID NO: 4584 - DNA, 51 bp, synthetic construct
  misc_feature 1..51: note = Synthetic polynucleotide
  source 1..51: mol_type = other DNA
cagcaggagctggcttgggagtgtgrctaccgtcgtgaggcggcttgtgcc

SEQ ID NO: 4585 - DNA, 51 bp, synthetic construct
  misc_feature 1..51: note = Synthetic polynucleotide
  source 1..51: mol_type = other DNA
tacacgcgcagggccctggccaccgrggtcaccgccggcctgctatcgctg

SEQ ID NO: 4586 - DNA, 51 bp, synthetic construct
  misc_feature 1..51: note = Synthetic polynucleotide
  source 1..51: mol_type = other DNA
ggcaggtgggatggagagcatgtccratgttccatatgtaatgaacagagg

SEQ ID NO: 4587 - DNA, 51 bp, synthetic construct
  misc_feature 1..51: note = Synthetic polynucleotide
  source 1..51: mol_type = other DNA
tccacctgtgctgtctctttcctgcrgcaacacgggattcccatcccggtc

SEQ ID NO: 4588 - DNA, 51 bp, synthetic construct
  misc_feature 1..51: note = Synthetic polynucleotide
  source 1..51: mol_type = other DNA
cccacttgctcccctcttttgcctcrgggaacgccccatgtacggccggga

SEQ ID NO: 4589 - DNA, 51 bp, synthetic construct
  misc_feature 1..51: note = Synthetic polynucleotide
  source 1..51: mol_type = other DNA
gcataatgcatgtgggagggctcagbgccgtctgaatagaggagagcaaaa

SEQ ID NO: 4590 - DNA, 51 bp, synthetic construct
  misc_feature 1..51: note = Synthetic polynucleotide
  source 1..51: mol_type = other DNA
ccccactgtctctcttctttctgtcrggggctcccacaggatcagaggctg

SEQ ID NO: 4591 - DNA, 51 bp, synthetic construct
  misc_feature 1..51: note = Synthetic polynucleotide
  source 1..51: mol_type = other DNA
ctcctgggctgcttcgggctcacagrgcccaacagcggaagtgaccccagc

SEQ ID NO: 4592 - DNA, 51 bp, synthetic construct
  misc_feature 1..51: note = Synthetic polynucleotide
  source 1..51: mol_type = other DNA
tggggagtagatctgctaaaatttgrtggttgttactgtgacagtttggaa

SEQ ID NO: 4593 - DNA, 51 bp, synthetic construct
  misc_feature 1..51: note = Synthetic polynucleotide
  source 1..51: mol_type = other DNA
tattttacccattgttttctcatacrggttataagcacatgtccttggccc

SEQ ID NO: 4594 - DNA, 51 bp, synthetic construct
  misc_feature 1..51: note = Synthetic polynucleotide
  source 1..51: mol_type = other DNA
tcatatctgttttcacagcccaattrtacagaaatccgacagtactgcaat

SEQ ID NO: 4595 - DNA, 51 bp, synthetic construct
  misc_feature 1..51: note = Synthetic polynucleotide
  source 1..51: mol_type = other DNA
gctcggcggcggcgggcgcgggaagrtggcggcagcggcggcggcggctgc

SEQ ID NO: 4596 - DNA, 51 bp, synthetic construct
  misc_feature 1..51: note = Synthetic polynucleotide
  source 1..51: mol_type = other DNA
taaaatttttctttgggaaattaccrggttctgaagtaattgttggagtaa

SEQ ID NO: 4597 - DNA, 51 bp, synthetic construct
  misc_feature 1..51: note = Synthetic polynucleotide
  source 1..51: mol_type = other DNA
agtgggcagcccatccctcgagtggdatacatggaggaagaaaagaaaaca

SEQ ID NO: 4598 - DNA, 51 bp, synthetic construct
  misc_feature 1..51: note = Synthetic polynucleotide
  source 1..51: mol_type = other DNA
cagattgactttccattccagatttrctggtttactgtggagtttgggctc

SEQ ID NO: 4599 - DNA, 51 bp, synthetic construct
  misc_feature 1..51: note = Synthetic polynucleotide
  source 1..51: mol_type = other DNA
tgattatttctttttccctcctaccrggaaataataaactttacatgtttg

SEQ ID NO: 4600 - DNA, 51 bp, synthetic construct
  misc_feature 1..51: note = Synthetic polynucleotide
  source 1..51: mol_type = other DNA
attaacgtgggtgtctcattgcctcrgagaacacagcgcagcacggaaatt

SEQ ID NO: 4601 - DNA, 51 bp, synthetic construct
  misc_feature 1..51: note = Synthetic polynucleotide
  source 1..51: mol_type = other DNA
ttctctctttttgttttgtttttccrgattcgctttgtggtggaactcgtg

SEQ ID NO: 4602 - DNA, 51 bp, synthetic construct
  misc_feature 1..51: note = Synthetic polynucleotide
  source 1..51: mol_type = other DNA
ccccgtgacccctgactctgcccccrgagccctcggcagtctctcttcttc

SEQ ID NO: 4603 - DNA, 51 bp, synthetic construct
  misc_feature 1..51: note = Synthetic polynucleotide
  source 1..51: mol_type = other DNA
taatgttctttatttcttcttttttrgataaaatcagtggttctggaagta

SEQ ID NO: 4604 - DNA, 51 bp, synthetic construct
  misc_feature 1..51: note = Synthetic polynucleotide
  source 1..51: mol_type = other DNA
tgcactgcttgtggacaacaggtcartcattttcaaaaagattccatttat

SEQ ID NO: 4605 - DNA, 51 bp, synthetic construct
  misc_feature 1..51: note = Synthetic polynucleotide
  source 1..51: mol_type = other DNA
cttctattaccgtggcgacacgctgrtggcggccaccctcgggcagcacaa

SEQ ID NO: 4606 - DNA, 51 bp, synthetic construct
  misc_feature 1..51: note = Synthetic polynucleotide
  source 1..51: mol_type = other DNA
atgtattgcaatttgtaacgttaatrgcttgcgccgggcacaatagttgaa

SEQ ID NO: 4607 - DNA, 51 bp, synthetic construct
  misc_feature 1..51: note = Synthetic polynucleotide
  source 1..51: mol_type = other DNA
atagtatttgcctttattgcaagggragtccttaggcatgatttttgagaa

SEQ ID NO: 4608 - DNA, 51 bp, synthetic construct
  misc_feature 1..51: note = Synthetic polynucleotide
  source 1..51: mol_type = other DNA
gagccctcccaggtcatcttctgcartcgcagtccgcgcgtcgtgctgccc

SEQ ID NO: 4609 - DNA, 51 bp, synthetic construct
  misc_feature 1..51: note = Synthetic polynucleotide
  source 1..51: mol_type = other DNA
ccaaccttgacctgttttgtgttccrgggagaacgaggcaagccggggctc

SEQ ID NO: 4610 - DNA, 51 bp, synthetic construct
  misc_feature 1..51: note = Synthetic polynucleotide
  source 1..51: mol_type = other DNA
aatgaataacaatttaatgcttttcrggctttcaaaaagcaatggtcaaga

SEQ ID NO: 4611 - DNA, 51 bp, synthetic construct
  misc_feature 1..51: note = Synthetic polynucleotide
  source 1..51: mol_type = other DNA
tcaacagtgtccttcattcccccacrgaactgcccaagatggaatccaagg

SEQ ID NO: 4612 - DNA, 51 bp, synthetic construct
  misc_feature 1..51: note = Synthetic polynucleotide
  source 1..51: mol_type = other DNA
caggccctctctgctcccttgctctrgggaccgcctgactcacaatgacat

SEQ ID NO: 4613 - DNA, 51 bp, synthetic construct
  misc_feature 1..51: note = Synthetic polynucleotide
  source 1..51: mol_type = other DNA
aagaggtcataataggcttctttcavattttcagtttacatagagttttaa

SEQ ID NO: 4614 - DNA, 51 bp, synthetic construct
  misc_feature 1..51: note = Synthetic polynucleotide
  source 1..51: mol_type = other DNA
agtgggatcacatgtgccaacaggtrtagacaatctctttcactgtggctt

SEQ ID NO: 4615 - DNA, 51 bp, synthetic construct
  misc_feature 1..51: note = Synthetic polynucleotide
  source 1..51: mol_type = other DNA
aaacgttgttgcatttgtctgtttcrgttactggtggaagagttgcccctg

SEQ ID NO: 4616 - DNA, 51 bp, synthetic construct
  misc_feature 1..51: note = Synthetic polynucleotide
  source 1..51: mol_type = other DNA
agctgtgaatgcttcattcaggcccragtaaatataggaagaggtgtagtg

SEQ ID NO: 4617 - DNA, 51 bp, synthetic construct
  misc_feature 1..51: note = Synthetic polynucleotide
  source 1..51: mol_type = other DNA
gctgtgaatgcttcattcaggcccargtaaatataggaagaggtgtagtgg

SEQ ID NO: 4618 - DNA, 51 bp, synthetic construct
  misc_feature 1..51: note = Synthetic polynucleotide
  source 1..51: mol_type = other DNA
tgttgcaattttcttcttcctttgtrgaccttttcaagcaagtggcaagtt

SEQ ID NO: 4619 - DNA, 51 bp, synthetic construct
  misc_feature 1..51: note = Synthetic polynucleotide
  source 1..51: mol_type = other DNA
gagatgatgacacgttctccagttavggtaagaacataggccgtctcagtg

SEQ ID NO: 4620 - DNA, 51 bp, synthetic construct
  misc_feature 1..51: note = Synthetic polynucleotide
  source 1..51: mol_type = other DNA
ttgctctgcccctgcccttctccccrgtgggccccaccatcctgaataaga

SEQ ID NO: 4621 - DNA, 51 bp, synthetic construct
  misc_feature 1..51: note = Synthetic polynucleotide
  source 1..51: mol_type = other DNA
agatttacttttccttttcatggacrgggctgccggtcacttgctgcaggg

SEQ ID NO: 4622 - DNA, 51 bp, synthetic construct
  misc_feature 1..51: note = Synthetic polynucleotide
  source 1..51: mol_type = other DNA
gttagctccttcttgccaaccaaccrtgagctcccagattcgtcagaatta

SEQ ID NO: 4623 - DNA, 51 bp, synthetic construct
  misc_feature 1..51: note = Synthetic polynucleotide
  source 1..51: mol_type = other DNA
gtgcagagcttttcctgcttaccctrcgggcgtctggcctaccacctggct

SEQ ID NO: 4624 - DNA, 51 bp, synthetic construct
  misc_feature 1..51: note = Synthetic polynucleotide
  source 1..51: mol_type = other DNA
tactaaattttttgctaggatggcadtggctatattagtgctgcagaactt

SEQ ID NO: 4625 - DNA, 51 bp, synthetic construct
  misc_feature 1..51: note = Synthetic polynucleotide
  source 1..51: mol_type = other DNA
acacagtgcaagcgcgtaggaacacratgctgggtgtttgggtgagtaatc

SEQ ID NO: 4626 - DNA, 51 bp, synthetic construct
  misc_feature 1..51: note = Synthetic polynucleotide
  source 1..51: mol_type = other DNA
ggaccagcgcacagcaaacagatacytgagggagagctgcagcgaagtcaa

SEQ ID NO: 4627 - DNA, 51 bp, synthetic construct
  misc_feature 1..51: note = Synthetic polynucleotide
  source 1..51: mol_type = other DNA
tacttctgttttataaaggtggactvtgcgccctcattaatggctcggctt

SEQ ID NO: 4628 - DNA, 51 bp, synthetic construct
  misc_feature 1..51: note = Synthetic polynucleotide
  source 1..51: mol_type = other DNA
aatttcatccattgccagacgaccgyattctgtgaagagctttaaaaaaga

SEQ ID NO: 4629 - DNA, 51 bp, synthetic construct
  misc_feature 1..51: note = Synthetic polynucleotide
  source 1..51: mol_type = other DNA
gtcatggtgtccctgctgacagattrctcacctcagctccagaagcctaaa

SEQ ID NO: 4630 - DNA, 51 bp, synthetic construct
  misc_feature 1..51: note = Synthetic polynucleotide
  source 1..51: mol_type = other DNA
aataaagtgcagctgaagggccgtgrccttctcactctaaaaaactttacc

SEQ ID NO: 4631 - DNA, 51 bp, synthetic construct
  misc_feature 1..51: note = Synthetic polynucleotide
  source 1..51: mol_type = other DNA
actctaaaaaactttaccggagaagraattaaatatatgctatggctatca

SEQ ID NO: 4632 - DNA, 51 bp, synthetic construct
  misc_feature 1..51: note = Synthetic polynucleotide
  source 1..51: mol_type = other DNA
tcgtcctttacacaattaaaagaagdtgctgtttaatctgaggatcctgtt

SEQ ID NO: 4633 - DNA, 51 bp, synthetic construct
  misc_feature 1..51: note = Synthetic polynucleotide
  source 1..51: mol_type = other DNA
cttaggcatgatttttgagaaaagargtactcgaacaagattgtctacaga

SEQ ID NO: 4634 - DNA, 51 bp, synthetic construct
  misc_feature 1..51: note = Synthetic polynucleotide
  source 1..51: mol_type = other DNA
gatttttgagaaaagaagtactcgarcaagattgtctacagaaacaggtaa

SEQ ID NO: 4635 - DNA, 51 bp, synthetic construct
  misc_feature 1..51: note = Synthetic polynucleotide
  source 1..51: mol_type = other DNA
tgttttcttaccacacaagatattcdtttgggtgtgaatgaaagtctcacg

SEQ ID NO: 4636 - DNA, 51 bp, synthetic construct
  misc_feature 1..51: note = Synthetic polynucleotide
  source 1..51: mol_type = other DNA
ttgggtgtgaatgaaagtctcacggrcacggcccggtttgtaaatattttc

SEQ ID NO: 4637 - DNA, 51 bp, synthetic construct
  misc_feature 1..51: note = Synthetic polynucleotide
  misc_difference 26: note = n is a, c, g, t or u
  source 1..51: mol_type = other DNA
gattatctttttcttggtttgccacngtgtattgtctagcatggcagatgc

SEQ ID NO: 4638 - DNA, 51 bp, synthetic construct
  misc_feature 1..51: note = Synthetic polynucleotide
  source 1..51: mol_type = other DNA
taaagaagcatccatcccaattatcratgggctgtcagatttgtaccatcc

SEQ ID NO: 4639 - DNA, 51 bp, synthetic construct
  misc_feature 1..51: note = Synthetic polynucleotide
  source 1..51: mol_type = other DNA
aaagaagcatccatcccaattatcartgggctgtcagatttgtaccatcct

SEQ ID NO: 4640 - DNA, 51 bp, synthetic construct
  misc_feature 1..51: note = Synthetic polynucleotide
  source 1..51: mol_type = other DNA
atcaatgggctgtcagatttgtaccvtcctatccagatcctggctgattac

SEQ ID NO: 4641 - DNA, 51 bp, synthetic construct
  misc_feature 1..51: note = Synthetic polynucleotide
  source 1..51: mol_type = other DNA
taccatcctatccagatcctggctgdttacctcacgctccaggttggttta

SEQ ID NO: 4642 - DNA, 51 bp, synthetic construct
  misc_feature 1..51: note = Synthetic polynucleotide
  source 1..51: mol_type = other DNA
catcctatccagatcctggctgattrcctcacgctccaggttggtttattt

SEQ ID NO: 4643 - DNA, 51 bp, synthetic construct
  misc_feature 1..51: note = Synthetic polynucleotide
  source 1..51: mol_type = other DNA
tcatctccttcatcccgtgccttttrggaacactatagctctctgaaaggt

SEQ ID NO: 4644 - DNA, 51 bp, synthetic construct
  misc_feature 1..51: note = Synthetic polynucleotide
  source 1..51: mol_type = other DNA
tctccttcatcccgtgccttttaggracactatagctctctgaaaggtctt

SEQ ID NO: 4645 - DNA, 51 bp, synthetic construct
  misc_feature 1..51: note = Synthetic polynucleotide
  source 1..51: mol_type = other DNA
tcatcccgtgccttttaggaacactrtagctctctgaaaggtcttaccctc

SEQ ID NO: 4646 - DNA, 51 bp, synthetic construct
  misc_feature 1..51: note = Synthetic polynucleotide
  source 1..51: mol_type = other DNA
cctcagctggatcggggatgggaacratatcctgcactccatcatgatgag

SEQ ID NO: 4647 - DNA, 51 bp, synthetic construct
  misc_feature 1..51: note = Synthetic polynucleotide
  source 1..51: mol_type = other DNA
ctcagctggatcggggatgggaacartatcctgcactccatcatgatgagc

SEQ ID NO: 4648 - DNA, 51 bp, synthetic construct
  misc_feature 1..51: note = Synthetic polynucleotide
  source 1..51: mol_type = other DNA
tgggaacaatatcctgcactccatcrtgatgagcgcagcgaaattcggaat

SEQ ID NO: 4649 - DNA, 51 bp, synthetic construct
  misc_feature 1..51: note = Synthetic polynucleotide
  source 1..51: mol_type = other DNA
aagttggcagagcagtatgccaaagdggtatgctctttacatgtaaagcta

SEQ ID NO: 4650 - DNA, 51 bp, synthetic construct
  misc_feature 1..51: note = Synthetic polynucleotide
  source 1..51: mol_type = other DNA
tggcagagcagtatgccaaagaggtrtgctctttacatgtaaagctattat

SEQ ID NO: 4651 - DNA, 51 bp, synthetic construct
  misc_feature 1..51: note = Synthetic polynucleotide
  source 1..51: mol_type = other DNA
tttaaccagcgtgtttatgtatgctrgaatggtaccaagctgttgctgaca

SEQ ID NO: 4652 - DNA, 51 bp, synthetic construct
  misc_feature 1..51: note = Synthetic polynucleotide
  source 1..51: mol_type = other DNA
catggaggcaatgtattaattacagrcacttggataagcatgggacaagaa

SEQ ID NO: 4653 - DNA, 51 bp, synthetic construct
  misc_feature 1..51: note = Synthetic polynucleotide
  source 1..51: mol_type = other DNA
tggaggcaatgtattaattacagacrcttggataagcatgggacaagaaga

SEQ ID NO: 4654 - DNA, 51 bp, synthetic construct
  misc_feature 1..51: note = Synthetic polynucleotide
  source 1..51: mol_type = other DNA
gctgcctctgactggacatttttacdctgcttgcccagaaagccagaagaa

SEQ ID NO: 4655 - DNA, 51 bp, synthetic construct
  misc_feature 1..51: note = Synthetic polynucleotide
  source 1..51: mol_type = other DNA
cactgcttgcccagaaagccagaagragtggatgatgaagtcttttattct

SEQ ID NO: 4656 - DNA, 51 bp, synthetic construct
  misc_feature 1..51: note = Synthetic polynucleotide
  source 1..51: mol_type = other DNA
actagtgttcccagaggcagaaaacrgaaagtggacaatcatggtaagcaa

SEQ ID NO: 4657 - DNA, 51 bp, synthetic construct
  misc_feature 1..51: note = Synthetic polynucleotide
  source 1..51: mol_type = other DNA
gggctcaagaacggcatgaagtactrccgggacacagacacccctggcagg

SEQ ID NO: 4658 - DNA, 51 bp, synthetic construct
  misc_feature 1..51: note = Synthetic polynucleotide
  source 1..51: mol_type = other DNA
agcctgcagcccctacttctgtgcgdtgttcacaggtatggtgagtggcca

SEQ ID NO: 4659 - DNA, 51 bp, synthetic construct
  misc_feature 1..51: note = Synthetic polynucleotide
  source 1..51: mol_type = other DNA
ctcacatcagtattaaaacgacttaygtagcgctccggatgtttgtcatac

SEQ ID NO: 4660 - DNA, 51 bp, synthetic construct
  misc_feature 1..51: note = Synthetic polynucleotide
  source 1..51: mol_type = other DNA
tcctaccgagttcgagccctggactrctgggcccgaccaggccccttctcg

SEQ ID NO: 4661 - DNA, 51 bp, synthetic construct
  misc_feature 1..51: note = Synthetic polynucleotide
  source 1..51: mol_type = other DNA
gtgtaacagttcctgcatgggcggcvtgaaccggaggcccatcctcaccat

SEQ ID NO: 4662 - DNA, 51 bp, synthetic construct
  misc_feature 1..51: note = Synthetic polynucleotide
  source 1..51: mol_type = other DNA
gccatgatgagatcacccaagtaatyggggtggcgaacaaagccccaccat

SEQ ID NO: 4663 - DNA, 51 bp, synthetic construct
  misc_feature 1..51: note = Synthetic polynucleotide
  source 1..51: mol_type = other DNA
attaaaaaatatttttatttcctctrgggtcctactggtcctattggtcct

SEQ ID NO: 4664 - DNA, 51 bp, synthetic construct
  misc_feature 1..51: note = Synthetic polynucleotide
  source 1..51: mol_type = other DNA
tcttgaaattgtatttaattttttcrgggccctcctggtcctcctggaact

SEQ ID NO: 4665 - DNA, 51 bp, synthetic construct
  misc_feature 1..51: note = Synthetic polynucleotide
  source 1..51: mol_type = other DNA
cattgtgatgtcatgatactttcttdgggacctgttggacccagtggacct

SEQ ID NO: 4666 - DNA, 51 bp, synthetic construct
  misc_feature 1..51: note = Synthetic polynucleotide
  source 1..51: mol_type = other DNA
aaaagagctcttgaaattgtatttarttttttcagggccctcctggtcctc

SEQ ID NO: 4667 - DNA, 51 bp, synthetic construct
  misc_feature 1..51: note = Synthetic polynucleotide
  source 1..51: mol_type = other DNA
acagagtgtatcattatacttttctdggggcctggtggtgacaaaggagac

SEQ ID NO: 4668 - DNA, 51 bp, synthetic construct
  misc_feature 1..51: note = Synthetic polynucleotide
  source 1..51: mol_type = other DNA
cttctcaattgaatgttttcatcttrgggccctgctggccctgctggtgct

SEQ ID NO: 4669 - DNA, 51 bp, synthetic construct
  misc_feature 1..51: note = Synthetic polynucleotide
  source 1..51: mol_type = other DNA
agtaaataccgaccacttcttctttrgggtgctcctggtaagaatggagaa

SEQ ID NO: 4670 - DNA, 51 bp, synthetic construct
  misc_feature 1..51: note = Synthetic polynucleotide
  source 1..51: mol_type = other DNA
ctttttggcaataatgaaaaggtaarttgatcaagagagaggaaataggca

SEQ ID NO: 4671 - DNA, 51 bp, synthetic construct
  misc_feature 1..51: note = Synthetic polynucleotide
  source 1..51: mol_type = other DNA
agtgatggtcagtgtgtcgtagaggycacacagagtgtcaaatttccactc

SEQ ID NO: 4672 - DNA, 51 bp, synthetic construct
  misc_feature 1..51: note = Synthetic polynucleotide
  source 1..51: mol_type = other DNA
tttgttacttgttggtgatttatgcygactccgccttctgttatcattcga

SEQ ID NO: 4673 - DNA, 51 bp, synthetic construct
  misc_feature 1..51: note = Synthetic polynucleotide
  source 1..51: mol_type = other DNA
actgtcacggagttccagcccctctrttacgtggcagagagttttaatgat

SEQ ID NO: 4674 - DNA, 51 bp, synthetic construct
  misc_feature 1..51: note = Synthetic polynucleotide
  source 1..51: mol_type = other DNA
ttccactgcacacagtacatcagacdtggatccaagcccatgtataccccc

SEQ ID NO: 4675 - DNA, 51 bp, synthetic construct
  misc_feature 1..51: note = Synthetic polynucleotide
  source 1..51: mol_type = other DNA
attgcccagaacatagttggaatagygtttgccacagaggcccagagaaag

SEQ ID NO: 4676 - DNA, 51 bp, synthetic construct
  misc_feature 1..51: note = Synthetic polynucleotide
  source 1..51: mol_type = other DNA
ccagctagccccagacttcggccccrtgcggctcacccgctgccaggctgc

SEQ ID NO: 4677 - DNA, 51 bp, synthetic construct
  misc_feature 1..51: note = Synthetic polynucleotide
  source 1..51: mol_type = other DNA
gtatggacttggaagccctaggtccragagagccttggagaatttacttcc

SEQ ID NO: 4678 - DNA, 51 bp, synthetic construct
  misc_feature 1..51: note = Synthetic polynucleotide
  source 1..51: mol_type = other DNA
taatgtatactgtatgtttacccaargaagtttcctatcagaggtttggaa

SEQ ID NO: 4679 - DNA, 51 bp, synthetic construct
  misc_feature 1..51: note = Synthetic polynucleotide
  source 1..51: mol_type = other DNA
gcccatgaagacctcatagaaatcayaggacaagcctttggcaccaaacat

SEQ ID NO: 4680 - DNA, 51 bp, synthetic construct
  misc_feature 1..51: note = Synthetic polynucleotide
  source 1..51: mol_type = other DNA
tgattccttcagcaggtacaggctgycatcttccagaaagctgtgggccaa

SEQ ID NO: 4681 - DNA, 51 bp, synthetic construct
  misc_feature 1..51: note = Synthetic polynucleotide
  source 1..51: mol_type = other DNA
tgttctttctttctttataatttatrgattttgcatgctgaaacttctcaa

SEQ ID NO: 4682 - DNA, 51 bp, synthetic construct
  misc_feature 1..51: note = Synthetic polynucleotide
  source 1..51: mol_type = other DNA
aaattaaacttctcccattcctttcrgagggaaccccttacctggaatctg

SEQ ID NO: 4683 - DNA, 51 bp, synthetic construct
  misc_feature 1..51: note = Synthetic polynucleotide
  source 1..51: mol_type = other DNA
ggaaatgacaatcaagtttcttacaytgtatcaataatgttgccaactttg

SEQ ID NO: 4684 - DNA, 51 bp, synthetic construct
  misc_feature 1..51: note = Synthetic polynucleotide
  source 1..51: mol_type = other DNA
ttttggaagagattcatagtcctccyggaaaacacaagactccccatgtta

SEQ ID NO: 4685 - DNA, 51 bp, synthetic construct
  misc_feature 1..51: note = Synthetic polynucleotide
  source 1..51: mol_type = other DNA
accaatgccccgccgttctccacgaygggctataaagaagtaatcatcaca

SEQ ID NO: 4686 - DNA, 51 bp, synthetic construct
  misc_feature 1..51: note = Synthetic polynucleotide
  source 1..51: mol_type = other DNA
aagccaccgatatctaggtaatccayaatttgtcatcctggctttcaaagt

SEQ ID NO: 4687 - DNA, 51 bp, synthetic construct
  misc_feature 1..51: note = Synthetic polynucleotide
  source 1..51: mol_type = other DNA
gtcactcggatctttccagacaaggycagagtggggaggttgccctgcatc

SEQ ID NO: 4688 - DNA, 51 bp, synthetic construct
  misc_feature 1..51: note = Synthetic polynucleotide
  source 1..51: mol_type = other DNA
tggttcccagaagactgagagttcarccgaaggtaaagaacaagaagagaa

SEQ ID NO: 4689 - DNA, 51 bp, synthetic construct
  misc_feature 1..51: note = Synthetic polynucleotide
  source 1..51: mol_type = other DNA
ctgtggacccccaactctcactatgyggattcgaggctcatacttatgcaa

SEQ ID NO: 4690 - DNA, 51 bp, synthetic construct
  misc_feature 1..51: note = Synthetic polynucleotide
  source 1..51: mol_type = other DNA
agccttccagacccagaagccattgraatctacctctctttcactgtttta

SEQ ID NO: 4691 - DNA, 51 bp, synthetic construct
  misc_feature 1..51: note = Synthetic polynucleotide
  source 1..51: mol_type = other DNA
gctgggctcagcgatgggcccaaggrgccggcgccaaaggggcgcggcgcg

SEQ ID NO: 4692 - DNA, 51 bp, synthetic construct
  misc_feature 1..51: note = Synthetic polynucleotide
  source 1..51: mol_type = other DNA
ccagcaggtcttcgatgccaagaacrtgatggctgcctgtgacccccgcca

SEQ ID NO: 4693 - DNA, 51 bp, synthetic construct
  misc_feature 1..51: note = Synthetic polynucleotide
  source 1..51: mol_type = other DNA
tgcttctatttgttccctttcttacrgatttaatgtgtgccgaccatttcc

SEQ ID NO: 4694 - DNA, 51 bp, synthetic construct
  misc_feature 1..51: note = Synthetic polynucleotide
  source 1..51: mol_type = other DNA
ctccgtcatgtgctgtgactgcttgyagatggccatggcgcggacgcgggt

SEQ ID NO: 4695 - DNA, 51 bp, synthetic construct
  misc_feature 1..51: note = Synthetic polynucleotide
  source 1..51: mol_type = other DNA
tttcgacatagtgtggtggtgccctvtgagccgcctgaggtctggtttgca

SEQ ID NO: 4696 - DNA, 51 bp, synthetic construct
  misc_feature 1..51: note = Synthetic polynucleotide
  source 1..51: mol_type = other DNA
ggctctgactgtaccaccatccactrcaactacatgtgtaacagttcctgc

SEQ ID NO: 4697 - DNA, 51 bp, synthetic construct
  misc_feature 1..51: note = Synthetic polynucleotide
  source 1..51: mol_type = other DNA
cacagtccgaccctgagcacgcccaygttccccgcaggccggaacagcccc

SEQ ID NO: 4698 - DNA, 51 bp, synthetic construct
  misc_feature 1..51: note = Synthetic polynucleotide
  source 1..51: mol_type = other DNA
atctaatattatctcttctgtatttrggttcgactagtgatagtggatggt

SEQ ID NO: 4699 - DNA, 51 bp, synthetic construct
  misc_feature 1..51: note = Synthetic polynucleotide
  source 1..51: mol_type = other DNA
tctacagcagcaaaggccaccactcyttcccctgggagacataaaatcgtt

SEQ ID NO: 4700 - DNA, 51 bp, synthetic construct
  misc_feature 1..51: note = Synthetic polynucleotide
  source 1..51: mol_type = other DNA
aaaagatcctgagaagaaaactcctyctacagcagcaaaggccaccactct

SEQ ID NO: 4701 - DNA, 51 bp, synthetic construct
  misc_feature 1..51: note = Synthetic polynucleotide
  source 1..51: mol_type = other DNA
cactcgaacgacccattcaacgtctdcatcgagtccgatgcctggcaagag

SEQ ID NO: 4702 - DNA, 51 bp, synthetic construct
  misc_feature 1..51: note = Synthetic polynucleotide
  source 1..51: mol_type = other DNA
ttcactgctgaacgaagtattgaagrtgaactaaatcgtgaaagtgacagt

SEQ ID NO: 4703 - DNA, 51 bp, synthetic construct
  misc_feature 1..51: note = Synthetic polynucleotide
  source 1..51: mol_type = other DNA
ctggggctgtgtcccactcaccctgygcagagctgacacagtctgaaagga

SEQ ID NO: 4704 - DNA, 51 bp, synthetic construct
  misc_feature 1..51: note = Synthetic polynucleotide
  source 1..51: mol_type = other DNA
gggtggccaggcgagagcgtggaggrgaacgccaatgtggtggtgcggctg

SEQ ID NO: 4705 - DNA, 51 bp, synthetic construct
  misc_feature 1..51: note = Synthetic polynucleotide
  source 1..51: mol_type = other DNA
tttgtatatatattttttatctttcrgcctcagggatttagagatactgtt

SEQ ID NO: 4706 - DNA, 51 bp, synthetic construct
  misc_feature 1..51: note = Synthetic polynucleotide
  source 1..51: mol_type = other DNA
tgtatttttaaaaatcatttcttatrggtatgttcacatacgatgaatcta

SEQ ID NO: 4707 - DNA, 51 bp, synthetic construct
  misc_feature 1..51: note = Synthetic polynucleotide
  source 1..51: mol_type = other DNA
tccttggcaatgtaaacagccactcyggtttttccactccctgtagggagg

SEQ ID NO: 4708 - DNA, 51 bp, synthetic construct
  misc_feature 1..51: note = Synthetic polynucleotide
  source 1..51: mol_type = other DNA
gccacacagaacaggaacagcaccaygtagatgattttgtacattacgatt

SEQ ID NO: 4709 - DNA, 51 bp, synthetic construct
  misc_feature 1..51: note = Synthetic polynucleotide
  source 1..51: mol_type = other DNA
accgccaaacagaactacgtcaagcrcatgttcgtacacacaggtgagtgt

SEQ ID NO: 4710 - DNA, 51 bp, synthetic construct
  misc_feature 1..51: note = Synthetic polynucleotide
  source 1..51: mol_type = other DNA
tgcctgatactacgtccatctcaccygttctgctcccaccatgctaattgg

SEQ ID NO: 4711 - DNA, 51 bp, synthetic construct
  misc_feature 1..51: note = Synthetic polynucleotide
  source 1..51: mol_type = other DNA
aagcacatggccgactaccccgactrcaagtaccggccccggaaaaagccc

SEQ ID NO: 4712 - DNA, 51 bp, synthetic construct
  misc_feature 1..51: note = Synthetic polynucleotide
  source 1..51: mol_type = other DNA
ttcagaccctgaggccgaggggggarcaatggggcccttgagggcccctcc

SEQ ID NO: 4713 - DNA, 51 bp, synthetic construct
  misc_feature 1..51: note = Synthetic polynucleotide
  source 1..51: mol_type = other DNA
gatttacttcccgtggtttcttctcrgagctgaacaaatggccagtgttca

SEQ ID NO: 4714 - DNA, 51 bp, synthetic construct
  misc_feature 1..51: note = Synthetic polynucleotide
  source 1..51: mol_type = other DNA
ggtgtctcctcatctcgctgctgtcyggaaggaaggaaggaatcacgccct

SEQ ID NO: 4715 - DNA, 51 bp, synthetic construct
  misc_feature 1..51: note = Synthetic polynucleotide
  source 1..51: mol_type = other DNA
aatctcagccaagcttgttgcaaatrtgctatctgtagcaggtgcagatca

SEQ ID NO: 4716 - DNA, 51 bp, synthetic construct
  misc_feature 1..51: note = Synthetic polynucleotide
  source 1..51: mol_type = other DNA
tcgccctcgccctcgacccgcagccrtggtgcccggggtgcccggcgcggt

SEQ ID NO: 4717 - DNA, 51 bp, synthetic construct
  misc_feature 1..51: note = Synthetic polynucleotide
  source 1..51: mol_type = other DNA
tggtgcttctttgaggatgatgtcartgagttcacctgccctgtgtgtttc

SEQ ID NO: 4718 - DNA, 51 bp, synthetic construct
  misc_feature 1..51: note = Synthetic polynucleotide
  source 1..51: mol_type = other DNA
cacaaagtcagctccacataaatgaytgagtttgcccttggacccatcatt

SEQ ID NO: 4719 - DNA, 51 bp, synthetic construct
  misc_feature 1..51: note = Synthetic polynucleotide
  source 1..51: mol_type = other DNA
tttctctcacacctgaactttaagtygtctgtttggaagatctgtatagag

SEQ ID NO: 4720 - DNA, 51 bp, synthetic construct
  misc_feature 1..51: note = Synthetic polynucleotide
  source 1..51: mol_type = other DNA
cttttctactccttgtattttgtgcrggtctgcagactcgtgaatgaggtc

SEQ ID NO: 4721 - DNA, 51 bp, synthetic construct
  misc_feature 1..51: note = Synthetic polynucleotide
  source 1..51: mol_type = other DNA
gggcttcttgcattctgggacagccdagtctgtgacttgcacggtcagttg

SEQ ID NO: 4722 - DNA, 51 bp, synthetic construct
  misc_feature 1..51: note = Synthetic polynucleotide
  source 1..51: mol_type = other DNA
cgtgtttgtgcctgtcctgggagagdccggcgcacagaggaagagaatctc

SEQ ID NO: 4723 - DNA, 51 bp, synthetic construct
  misc_feature 1..51: note = Synthetic polynucleotide
  source 1..51: mol_type = other DNA
cccctgcctggctgccctccctctcrggtctgctggcaggactgtgggagt

SEQ ID NO: 4724 - DNA, 51 bp, synthetic construct
  misc_feature 1..51: note = Synthetic polynucleotide
  source 1..51: mol_type = other DNA
tctcctccctgcttctgtctcctacrgccacctgaagtccaaaaagggtca

SEQ ID NO: 4725 - DNA, 51 bp, synthetic construct
  misc_feature 1..51: note = Synthetic polynucleotide
  source 1..51: mol_type = other DNA
ggcttctcttttttttctgtccaccrgggagtaactattcccagtcagagg

SEQ ID NO: 4726 - DNA, 51 bp, synthetic construct
  misc_feature 1..51: note = Synthetic polynucleotide
  source 1..51: mol_type = other DNA
atatattttaattttgtgcccttgcrgattgatcacttattcattagtaat

SEQ ID NO: 4727 - DNA, 51 bp, synthetic construct
  misc_feature 1..51: note = Synthetic polynucleotide
  source 1..51: mol_type = other DNA
tggaaagggacgaactggtgtaatgrtatgtgcatatttattacatcgggg

SEQ ID NO: 4728 - DNA, 51 bp, synthetic construct
  misc_feature 1..51: note = Synthetic polynucleotide
  source 1..51: mol_type = other DNA
taaattattttctgtttgatttgccdgtttagatgcaaaatccacaagtat

SEQ ID NO: 4729 - DNA, 51 bp, synthetic construct
  misc_feature 1..51: note = Synthetic polynucleotide
  source 1..51: mol_type = other DNA
ggtccaacagcaacagtatatgggtragagttgtcaagattaaggcaaaca

SEQ ID NO: 4730 - DNA, 51 bp, synthetic construct
  misc_feature 1..51: note = Synthetic polynucleotide
  source 1..51: mol_type = other DNA
tggaccaaaatagacaatcttgaagvtacaattgtcttaaactggagaaaa

SEQ ID NO: 4731 - DNA, 51 bp, synthetic construct
  misc_feature 1..51: note = Synthetic polynucleotide
  source 1..51: mol_type = other DNA
catctgagcattgtgaccctggaggrggcaccatttgtcattgtggaaagt

SEQ ID NO: 4732 - DNA, 51 bp, synthetic construct
  misc_feature 1..51: note = Synthetic polynucleotide
  source 1..51: mol_type = other DNA
tgtagctatacgttagctcttgcacrtgctgtgtggcaccattctagcatc

SEQ ID NO: 4733 - DNA, 51 bp, synthetic construct
  misc_feature 1..51: note = Synthetic polynucleotide
  source 1..51: mol_type = other DNA
gaaacacatgaaattgtggcgatcargaaattcaaggacagtgaaggtaga

SEQ ID NO: 4734 - DNA, 51 bp, synthetic construct
  misc_feature 1..51: note = Synthetic polynucleotide
  source 1..51: mol_type = other DNA
ctaatcaaggctattcactggtgccrtaagaatgatattgtccatcgaggt

SEQ ID NO: 4735 - DNA, 51 bp, synthetic construct
  misc_feature 1..51: note = Synthetic polynucleotide
  source 1..51: mol_type = other DNA
agcgctccctatggaaagtccgtggrcatgtggtcggtgggctgtattctt

SEQ ID NO: 4736 - DNA, 51 bp, synthetic construct
  misc_feature 1..51: note = Synthetic polynucleotide
  source 1..51: mol_type = other DNA
tgaccatgccagcccatgggccacgytgaaattccctttttcacacactgc

SEQ ID NO: 4737 - DNA, 51 bp, synthetic construct
  misc_feature 1..51: note = Synthetic polynucleotide
  source 1..51: mol_type = other DNA
ctcctgcatgaaatgatacatgcctrtttatttgtcactaataacgacaaa

SEQ ID NO: 4738 - DNA, 51 bp, synthetic construct
  misc_feature 1..51: note = Synthetic polynucleotide
  source 1..51: mol_type = other DNA
ggaggatgaactggaccaagccagcrcccctacagacgtgcgggatatcga

SEQ ID NO: 4739 - DNA, 51 bp, synthetic construct
  misc_feature 1..51: note = Synthetic polynucleotide
  source 1..51: mol_type = other DNA
agggtcatgttcgtaggtgtatttcygttccaattcctccaactttttaag

SEQ ID NO: 4740 - DNA, 51 bp, synthetic construct
  misc_feature 1..51: note = Synthetic polynucleotide
  source 1..51: mol_type = other DNA
gttggattcttccatgttcatcactyttgtgtttgtgcccagaatgttaaa

SEQ ID NO: 4741 - DNA, 51 bp, synthetic construct
  misc_feature 1..51: note = Synthetic polynucleotide
  source 1..51: mol_type = other DNA
gatgcctgcacagttgacagctacayccacacggccaaactttccttttgc

SEQ ID NO: 4742 - DNA, 51 bp, synthetic construct
  misc_feature 1..51: note = Synthetic polynucleotide
  source 1..51: mol_type = other DNA
cgcgcggaccgggagctacccggtgrgaagtcctggtgctggtaccgacct

SEQ ID NO: 4743 - DNA, 51 bp, synthetic construct
  misc_feature 1..51: note = Synthetic polynucleotide
  source 1..51: mol_type = other DNA
cgagaaaaccgtcttcaccgtcttcrtgctagctgcctctggcatctgcat

SEQ ID NO: 4744 - DNA, 51 bp, synthetic construct
  misc_feature 1..51: note = Synthetic polynucleotide
  source 1..51: mol_type = other DNA
ttacccccagcagaggtgaaggaagrcagtgcgtacgggagccagtcagtg

SEQ ID NO: 4745 - DNA, 51 bp, synthetic construct
  misc_feature 1..51: note = Synthetic polynucleotide
  source 1..51: mol_type = other DNA
tgttacagaaattaagtattgcaacytactgagggctttgaaggctcttgg

SEQ ID NO: 4746 - DNA, 51 bp, synthetic construct
  misc_feature 1..51: note = Synthetic polynucleotide
  source 1..51: mol_type = other DNA
ttcctcacaggtttctactccaaagrccacatcatcgaaaccgcaaacata

SEQ ID NO: 4747 - DNA, 51 bp, synthetic construct
  misc_feature 1..51: note = Synthetic polynucleotide
  source 1..51: mol_type = other DNA
gtaatactttccaaaggcatggtctytgtcaatatttggatacagatactt

SEQ ID NO: 4748 - DNA, 51 bp, synthetic construct
  misc_feature 1..51: note = Synthetic polynucleotide
  source 1..51: mol_type = other DNA
gggaaagtaacagcagaaagttcttycttcgtgtagggttcaaccgcatgg

SEQ ID NO: 4749 - DNA, 51 bp, synthetic construct
  misc_feature 1..51: note = Synthetic polynucleotide
  source 1..51: mol_type = other DNA
gcattcgatgttcctcttaaagtggrtctcatcacctttgatacccccttt

SEQ ID NO: 4750 - DNA, 51 bp, synthetic construct
  misc_feature 1..51: note = Synthetic polynucleotide
  source 1..51: mol_type = other DNA
tacttacatacttgtttaacacttcrgggaagaaaagtcagaagaccagga

SEQ ID NO: 4751 - DNA, 51 bp, synthetic construct
  misc_feature 1..51: note = Synthetic polynucleotide
  misc_difference 26: note = n is a, c, g, t or u
  source 1..51: mol_type = other DNA
cttgtgtctttctgtttgtccccacngtccccagggaaaagcctttcgctc

SEQ ID NO: 4752 - DNA, 51 bp, synthetic construct
  misc_feature 1..51: note = Synthetic polynucleotide
  source 1..51: mol_type = other DNA
tttccttctgcttcttttcccttgcrggaaacacatgaaattgtggcgatc

SEQ ID NO: 4753 - DNA, 51 bp, synthetic construct
  misc_feature 1..51: note = Synthetic polynucleotide
  source 1..51: mol_type = other DNA
acaactttggactttgctatctttcrggttttgctcgtaatctgtcagaag

SEQ ID NO: 4754 - DNA, 51 bp, synthetic construct
  misc_feature 1..51: note = Synthetic polynucleotide
  source 1..51: mol_type = other DNA
gatatacttcttttgtttttaacatrgaaaccaagccggcaaaagtactgc

SEQ ID NO: 4755 - DNA, 51 bp, synthetic construct
  misc_feature 1..51: note = Synthetic polynucleotide
  source 1..51: mol_type = other DNA
ttggcagtgcaagtgcatgcctggcrgttgtactacagcaagaagctccta

SEQ ID NO: 4756 - DNA, 51 bp, synthetic construct
  misc_feature 1..51: note = Synthetic polynucleotide
  source 1..51: mol_type = other DNA
aactgagctctatgggacaggagcartggattttggagtaggtggctttgt

SEQ ID NO: 4757 - DNA, 51 bp, synthetic construct
  misc_feature 1..51: note = Synthetic polynucleotide
  source 1..51: mol_type = other DNA
tcgcaggcgcaggtctatgagctggrgcggcgcttcaagcagcagcggtac

SEQ ID NO: 4758 - DNA, 51 bp, synthetic construct
  misc_feature 1..51: note = Synthetic polynucleotide
  source 1..51: mol_type = other DNA
cgccgaggtgggcgcgggcggcaacragagccgccttactctctccatgtc

SEQ ID NO: 4759 - DNA, 51 bp, synthetic construct
  misc_feature 1..51: note = Synthetic polynucleotide
  source 1..51: mol_type = other DNA
gcggagcaacagagacatctgacgghaagcaacagcctatggtacagaata

SEQ ID NO: 4760 - DNA, 51 bp, synthetic construct
  misc_feature 1..51: note = Synthetic polynucleotide
  source 1..51: mol_type = other DNA
gatgacccatattctgtttcttactrggaatcaaccctcaaaagcgtattg

SEQ ID NO: 4761 - DNA, 51 bp, synthetic construct
  misc_feature 1..51: note = Synthetic polynucleotide
  source 1..51: mol_type = other DNA
ttcaatgagctgaagccagctgtggwtggggcaaacttcattgttaaccac

SEQ ID NO: 4762 - DNA, 51 bp, synthetic construct
  misc_feature 1..51: note = Synthetic polynucleotide
  source 1..51: mol_type = other DNA
gcagggtttgtgcaagtttgcaaacrtgttcaccctgtctcagacctcgag

SEQ ID NO: 4763 - DNA, 51 bp, synthetic construct
  misc_feature 1..51: note = Synthetic polynucleotide
  source 1..51: mol_type = other DNA
aatgcttcggactctcaagcaggaaracattgtggagttgaaggaagcatt

SEQ ID NO: 4764 - DNA, 51 bp, synthetic construct
  misc_feature 1..51: note = Synthetic polynucleotide
  source 1..51: mol_type = other DNA
aattttttttttatcttgacactccrgatataaaaccagaaaatctcttaa

SEQ ID NO: 4765 - DNA, 51 bp, synthetic construct
  misc_feature 1..51: note = Synthetic polynucleotide
  source 1..51: mol_type = other DNA
ttaatcagccacaatgatgtcctaaractgtgtgactttggtaagttaaaa

SEQ ID NO: 4766 - DNA, 51 bp, synthetic construct
  misc_feature 1..51: note = Synthetic polynucleotide
  source 1..51: mol_type = other DNA
acttcaagggcttcttttatcgtttyaaggttgtctctttccttggttaga

SEQ ID NO: 4767 - DNA, 51 bp, synthetic construct
  misc_feature 1..51: note = Synthetic polynucleotide
  source 1..51: mol_type = other DNA
attttaccaaatttttgtatttgatrgatcccattgaagaggaagatgcaa

SEQ ID NO: 4768 - DNA, 51 bp, synthetic construct
  misc_feature 1..51: note = Synthetic polynucleotide
  source 1..51: mol_type = other DNA
gtgtttaaaactatgcaaatggtaaytgcaagatctacaaaaggatccatt

SEQ ID NO: 4769 - DNA, 51 bp, synthetic construct
  misc_feature 1..51: note = Synthetic polynucleotide
  misc_difference 26: note = n is a, c, g, t or u
  source 1..51: mol_type = other DNA
tattagtattaatttgtattattcantttttttccccagtatgagaataat

SEQ ID NO: 4770 - DNA, 51 bp, synthetic construct
  misc_feature 1..51: note = Synthetic polynucleotide
  source 1..51: mol_type = other DNA
ttaatacagattttaaattctttacrgtgcacttcagaaggagatcacaac

SEQ ID NO: 4771 - DNA, 51 bp, synthetic construct
  misc_feature 1..51: note = Synthetic polynucleotide
  source 1..51: mol_type = other DNA
atccagaccaccttcatagccaacaytgtcaaaagcaaaactcttcttcat

SEQ ID NO: 4772 - DNA, 51 bp, synthetic construct
  misc_feature 1..51: note = Synthetic polynucleotide
  source 1..51: mol_type = other DNA
atgtgggacattattttttctttgcragggagaactaatgcctcacaggac

SEQ ID NO: 4773 - DNA, 51 bp, synthetic construct
  misc_feature 1..51: note = Synthetic polynucleotide
  source 1..51: mol_type = other DNA
taagtcaggaggtatttcttgttctrgggtgaatttgtgaatgagtatgtg

SEQ ID NO: 4774 - DNA, 51 bp, synthetic construct
  misc_feature 1..51: note = Synthetic polynucleotide
  source 1..51: mol_type = other DNA
aaaggaaactatgctcggttcatgartcattgctgccagcccaactgtgaa

SEQ ID NO: 4775 - DNA, 51 bp, synthetic construct
  misc_feature 1..51: note = Synthetic polynucleotide
  source 1..51: mol_type = other DNA
ggtgaaatcacaaaggagcgagaagrtgagtgttttagttgtggggatgct

SEQ ID NO: 4776 - DNA, 51 bp, synthetic construct
  misc_feature 1..51: note = Synthetic polynucleotide
  source 1..51: mol_type = other DNA
aatcctagacatggttcaagtgaggrctacctacacatggtgcacaggcta

SEQ ID NO: 4777 - DNA, 51 bp, synthetic construct
  misc_feature 1..51: note = Synthetic polynucleotide
  source 1..51: mol_type = other DNA
tgtttttttctcttcatttttctttrgcttgatatgcaacgaggtgttcat

SEQ ID NO: 4778 - DNA, 51 bp, synthetic construct
  misc_feature 1..51: note = Synthetic polynucleotide
  source 1..51: mol_type = other DNA
ccactacgacgacccgggcaagggcractactggatgctggacccgtcgag

SEQ ID NO: 4779 - DNA, 51 bp, synthetic construct
  misc_feature 1..51: note = Synthetic polynucleotide
  source 1..51: mol_type = other DNA
aagccaaaacgactgcaggagtggtrcaaaaagatgctggacaaggcgttt

SEQ ID NO: 4780 - DNA, 51 bp, synthetic construct
  misc_feature 1..51: note = Synthetic polynucleotide
  source 1..51: mol_type = other DNA
ctcacctgctccttctggacttcctrgggctgcagaccacaagactgggaa

SEQ ID NO: 4781 - DNA, 51 bp, synthetic construct
  misc_feature 1..51: note = Synthetic polynucleotide
  source 1..51: mol_type = other DNA
ttttttttttctccttattgttttargatctattctccagatcacactaac

SEQ ID NO: 4782 - DNA, 51 bp, synthetic construct
  misc_feature 1..51: note = Synthetic polynucleotide
  source 1..51: mol_type = other DNA
ttaactttgtctcttctcttcttatrggacctgtacctgcctctgtccttg

SEQ ID NO: 4783 - DNA, 51 bp, synthetic construct
  misc_feature 1..51: note = Synthetic polynucleotide
  source 1..51: mol_type = other DNA
tgtgcgtgtgcttctgaacaagaagrcagcccactcttttgagcaagtcct

SEQ ID NO: 4784 - DNA, 51 bp, synthetic construct
  misc_feature 1..51: note = Synthetic polynucleotide
  source 1..51: mol_type = other DNA
ggagaacaaggactttgtgcgccccragctggttaccatcatccgcagtgg

SEQ ID NO: 4785 - DNA, 51 bp, synthetic construct
  misc_feature 1..51: note = Synthetic polynucleotide
  source 1..51: mol_type = other DNA
caacagtgcacaggccagggagaacraggactttgtgcgccccaagctggt

SEQ ID NO: 4786 - DNA, 51 bp, synthetic construct
  misc_feature 1..51: note = Synthetic polynucleotide
  source 1..51: mol_type = other DNA
caatcccaactggtctgtcaacgtadaaacatctgccaatatgaaagcccc

SEQ ID NO: 4787 - DNA, 51 bp, synthetic construct
  misc_feature 1..51: note = Synthetic polynucleotide
  source 1..51: mol_type = other DNA
gacaacttctttaaaaaggtggagtrcaccaagaatgtcaatcccaactgg

SEQ ID NO: 4788 - DNA, 51 bp, synthetic construct
  misc_feature 1..51: note = Synthetic polynucleotide
  source 1..51: mol_type = other DNA
aattgaaaaaatgggaggcgcgacargtagaggagaaaattcctatggtct

SEQ ID NO: 4789 - DNA, 51 bp, synthetic construct
  misc_feature 1..51: note = Synthetic polynucleotide
  source 1..51: mol_type = other DNA
actgtcatacttctcctttgcccccrggacatgagaaacctgaggttcgct

SEQ ID NO: 4790 - DNA, 51 bp, synthetic construct
  misc_feature 1..51: note = Synthetic polynucleotide
  source 1..51: mol_type = other DNA
gacttgaatttctttttttcctcacrgggcttgcccaatcaccattggaga

SEQ ID NO: 4791 - DNA, 51 bp, synthetic construct
  misc_feature 1..51: note = Synthetic polynucleotide
  source 1..51: mol_type = other DNA
acagggcttgcccaatcaccattggrgaataacttttattaataagtgcta

SEQ ID NO: 4792 - DNA, 51 bp, synthetic construct
  misc_feature 1..51: note = Synthetic polynucleotide
  source 1..51: mol_type = other DNA
ttggtggttccgtatcgtgcctcagrtgatgacctccggagagttgcaact

SEQ ID NO: 4793 - DNA, 51 bp, synthetic construct
  misc_feature 1..51: note = Synthetic polynucleotide
  source 1..51: mol_type = other DNA
caatttttgattataattttggatcrtctgtatagttgccgatttggtact

SEQ ID NO: 4794 - DNA, 51 bp, synthetic construct
  misc_feature 1..51: note = Synthetic polynucleotide
  source 1..51: mol_type = other DNA
tttgagatccttggggttgtaggtgraggtaagttggaatttttgcgttcc

SEQ ID NO: 4795 - DNA, 51 bp, synthetic construct
  misc_feature 1..51: note = Synthetic polynucleotide
  source 1..51: mol_type = other DNA
gtggctaccaacattgatgagatctrtaaggccctgtcccgcaatagcagt

SEQ ID NO: 4796 - DNA, 51 bp, synthetic construct
  misc_feature 1..51: note = Synthetic polynucleotide
  source 1..51: mol_type = other DNA
cctgccaccattcccctgtttgcacrggctgaccggtaccagcgcctgaag

SEQ ID NO: 4797 - DNA, 51 bp, synthetic construct
  misc_feature 1..51: note = Synthetic polynucleotide
  source 1..51: mol_type = other DNA
gcctaacttgatttagggggaagaarccttaagaatagaggatatccttga

SEQ ID NO: 4798 - DNA, 51 bp, synthetic construct
  misc_feature 1..51: note = Synthetic polynucleotide
  misc_difference 26: note = n is a, c, g, t or u
  source 1..51: mol_type = other DNA
ttggacatcctggataccgccggccnggaggagtacagcgccatgcgggac

SEQ ID NO: 4799 - DNA, 51 bp, synthetic construct
  misc_feature 1..51: note = Synthetic polynucleotide
  source 1..51: mol_type = other DNA
ctagctggagggctgcatgcagggarggtcattaaaggttggtgatgaaac

SEQ ID NO: 4800 - DNA, 51 bp, synthetic construct
  misc_feature 1..51: note = Synthetic polynucleotide
  source 1..51: mol_type = other DNA
tccattgcctacaccctgaccagcadtatcccggagatcacgcccttcctg

SEQ ID NO: 4801 - DNA, 51 bp, synthetic construct
  misc_feature 1..51: note = Synthetic polynucleotide
  source 1..51: mol_type = other DNA
cagtgccgtagctcttatctagcaartgaaatcctgtggggccaccgctat

SEQ ID NO: 4802 - DNA, 51 bp, synthetic construct
  misc_feature 1..51: note = Synthetic polynucleotide
  source 1..51: mol_type = other DNA
tacacttacagttttgtctttcacaytccaaaacacagcagctccttccct

SEQ ID NO: 4803 - DNA, 51 bp, synthetic construct
  misc_feature 1..51: note = Synthetic polynucleotide
  source 1..51: mol_type = other DNA
gaaccttccaaactgaagcgctcctdctcctccccagatataacccaggct

SEQ ID NO: 4804 - DNA, 51 bp, synthetic construct
  misc_feature 1..51: note = Synthetic polynucleotide
  source 1..51: mol_type = other DNA
caatgtttcagctctacgcactttcrgggtactgagggctttgaaaactat

SEQ ID NO: 4805 - DNA, 51 bp, synthetic construct
  misc_feature 1..51: note = Synthetic polynucleotide
  source 1..51: mol_type = other DNA
ccccaggcaagccaggaagcagacartgttctgatcctgcaggacaggaag

SEQ ID NO: 4806 - DNA, 51 bp, synthetic construct
  misc_feature 1..51: note = Synthetic polynucleotide
  source 1..51: mol_type = other DNA
gtccaaggcgcggcgcatggccgccracgtgcgggagcgcaagcgcatcct

SEQ ID NO: 4807 - DNA, 51 bp, synthetic construct
  misc_feature 1..51: note = Synthetic polynucleotide
  source 1..51: mol_type = other DNA
gagtgagacgctgatgggaggatggrcgtactggtgtctgagtgctccgcg

SEQ ID NO: 4808 - DNA, 51 bp, synthetic construct
  misc_feature 1..51: note = Synthetic polynucleotide
  source 1..51: mol_type = other DNA
tggcgagtgagacgctgatgggaggrtggacgtactggtgtctgagtgctc

SEQ ID NO: 4809 - DNA, 51 bp, synthetic construct
  misc_feature 1..51: note = Synthetic polynucleotide
  source 1..51: mol_type = other DNA
ccgctggtggccgtgtattacaccarccgggccttgtgctacctgaagatg

SEQ ID NO: 4810 - DNA, 51 bp, synthetic construct
  misc_feature 1..51: note = Synthetic polynucleotide
  source 1..51: mol_type = other DNA
atgggcatcctctgtcctatctcccrgatacagcatcatgcaggcctgctg

SEQ ID NO: 4811 - DNA, 51 bp, synthetic construct
  misc_feature 1..51: note = Synthetic polynucleotide
  source 1..51: mol_type = other DNA
cataaggccccagcattcctgtatgrtatctacctcaggatgactggaaga

SEQ ID NO: 4812 - DNA, 51 bp, synthetic construct
  misc_feature 1..51: note = Synthetic polynucleotide
  source 1..51: mol_type = other DNA
gccatcccaggcaggcgagtgttgcyctgcagacccagaatcacagccttg

SEQ ID NO: 4813 - DNA, 51 bp, synthetic construct
  misc_feature 1..51: note = Synthetic polynucleotide
  source 1..51: mol_type = other DNA
tttgtgaaactgctttttgaaacagrgaaaatagatatagtactacatttt

SEQ ID NO: 4814 - DNA, 51 bp, synthetic construct
  misc_feature 1..51: note = Synthetic polynucleotide
  source 1..51: mol_type = other DNA
tctgttttgttttccaagacccaccratgacatgagatacccaatgaagtc

SEQ ID NO: 4815 - DNA, 51 bp, synthetic construct
  misc_feature 1..51: note = Synthetic polynucleotide
  source 1..51: mol_type = other DNA
gctcgacaggatattgaccaccgccygcggggataaagccagggagctggt

SEQ ID NO: 4816 - DNA, 51 bp, synthetic construct
  misc_feature 1..51: note = Synthetic polynucleotide
  source 1..51: mol_type = other DNA
catcgccgggggctcgctgtcctccrcccccatgagcacgccgtgcagctc

SEQ ID NO: 4817 - DNA, 51 bp, synthetic construct
  misc_feature 1..51: note = Synthetic polynucleotide
  source 1..51: mol_type = other DNA
acctctagcacttctctatgccaccrtcttcgggaatgtgacgactatttt

SEQ ID NO: 4818 - DNA, 51 bp, synthetic construct
  misc_feature 1..51: note = Synthetic polynucleotide
  source 1..51: mol_type = other DNA
ttcgggaatgtgacgactattttccracagatgtatgccaacaccaacaga

SEQ ID NO: 4819 - DNA, 51 bp, synthetic construct
  misc_feature 1..51: note = Synthetic polynucleotide
  source 1..51: mol_type = other DNA
ggacagaagaaactgtgccacttgtrtcaggaccacatgcagtacatcgga

SEQ ID NO: 4820 - DNA, 51 bp, synthetic construct
  misc_feature 1..51: note = Synthetic polynucleotide
  source 1..51: mol_type = other DNA
gccaagtttttattccttttctcttycattcgcttctttatgtcttcaaga

SEQ ID NO: 4821 - DNA, 51 bp, synthetic construct
  misc_feature 1..51: note = Synthetic polynucleotide
  source 1..51: mol_type = other DNA
acttagctacccactctatacccacrgaacggccacggcttcagctgccca

SEQ ID NO: 4822 - DNA, 51 bp, synthetic construct
  misc_feature 1..51: note = Synthetic polynucleotide
  source 1..51: mol_type = other DNA
gctcaagaatggccaggagatccagrtgagcggcaggtgcagcctggggtg

SEQ ID NO: 4823 - DNA, 51 bp, synthetic construct
  misc_feature 1..51: note = Synthetic polynucleotide
  source 1..51: mol_type = other DNA
tgttactatcttttgcttcttctgcrggaatcagaaggtcagggctgtcct

SEQ ID NO: 4824 - DNA, 51 bp, synthetic construct
  misc_feature 1..51: note = Synthetic polynucleotide
  source 1..51: mol_type = other DNA
ttcttcatgcgctccaggtgggcgcyggtgtcctgctccttcttcagctcc

SEQ ID NO: 4825 - DNA, 51 bp, synthetic construct
  misc_feature 1..51: note = Synthetic polynucleotide
  source 1..51: mol_type = other DNA
caagacaacctggcagatgctgaggrgcgctgtgatcagctgatcaaaaac

SEQ ID NO: 4826 - DNA, 51 bp, synthetic construct
  misc_feature 1..51: note = Synthetic polynucleotide
  source 1..51: mol_type = other DNA
aatatcaaggggaagcctgaagcccrcttctccctgatccactatgccggc

SEQ ID NO: 4827 - DNA, 51 bp, synthetic construct
  misc_feature 1..51: note = Synthetic polynucleotide
  source 1..51: mol_type = other DNA
caccacatgtttgtgctggagcaggrggagtacaagaaggagggcatcgag

SEQ ID NO: 4828 - DNA, 51 bp, synthetic construct
  misc_feature 1..51: note = Synthetic polynucleotide
  source 1..51: mol_type = other DNA
gctgctgaagagtgcagaaagagagraggagatggcctccatgaaggagga

SEQ ID NO: 4829 - DNA, 51 bp, synthetic construct
  misc_feature 1..51: note = Synthetic polynucleotide
  source 1..51: mol_type = other DNA
ctttcagactgtgtcagctctgcacrgggtgagtgggacacagccccagcc

SEQ ID NO: 4830 - DNA, 51 bp, synthetic construct
  misc_feature 1..51: note = Synthetic polynucleotide
  source 1..51: mol_type = other DNA
cttccagaggctgacaagtctgcctrcctcatggggctgaactcagccgac

SEQ ID NO: 4831 - DNA, 51 bp, synthetic construct
  misc_feature 1..51: note = Synthetic polynucleotide
  source 1..51: mol_type = other DNA
tacattgcactgtccccatctcaacrggtgctggagcagccggagtcctcc

SEQ ID NO: 4832 - DNA, 51 bp, synthetic construct
  misc_feature 1..51: note = Synthetic polynucleotide
  source 1..51: mol_type = other DNA
tctgctaccgctgccccccttcccarggctacaatgacgactactatgaag

SEQ ID NO: 4833 - DNA, 51 bp, synthetic construct
  misc_feature 1..51: note = Synthetic polynucleotide
  source 1..51: mol_type = other DNA
gtgcctctggctgccctggctgtccrctgccatgacacctatggtcaagcc

SEQ ID NO: 4834 - DNA, 51 bp, synthetic construct
  misc_feature 1..51: note = Synthetic polynucleotide
  source 1..51: mol_type = other DNA
ctacgtgcccttctctgctggccccrggaactgtataggtttgtatccatc

SEQ ID NO: 4835 - DNA, 51 bp, synthetic construct
  misc_feature 1..51: note = Synthetic polynucleotide
  source 1..51: mol_type = other DNA
gtcagcagggtggtctctattccacrgggcctacgcttctcaggggtcaat

SEQ ID NO: 4836 - DNA, 51 bp, synthetic construct
  misc_feature 1..51: note = Synthetic polynucleotide
  source 1..51: mol_type = other DNA
tttgaattatttcattctttttctcrgttagtgattggcaactttggcctc

SEQ ID NO: 4837 - DNA, 51 bp, synthetic construct
  misc_feature 1..51: note = Synthetic polynucleotide
  source 1..51: mol_type = other DNA
gtgtgattttcatggtgttttaaacrggaagaaacattaccaaggtcctca

SEQ ID NO: 4838 - DNA, 51 bp, synthetic construct
  misc_feature 1..51: note = Synthetic polynucleotide
  source 1..51: mol_type = other DNA
aatatatattaatctttcattttccrgctgcgagttttcaagttggcaaaa

SEQ ID NO: 4839 - DNA, 51 bp, synthetic construct
  misc_feature 1..51: note = Synthetic polynucleotide
  source 1..51: mol_type = other DNA
cctcaccctctgtggctgtgttttcrggcgttgggactccagctgcagctg

SEQ ID NO: 4840 - DNA, 51 bp, synthetic construct
  misc_feature 1..51: note = Synthetic polynucleotide
  source 1..51: mol_type = other DNA
tgacattgctgggcctggggcttacrggatgcccaggctgaggaagagatc

SEQ ID NO: 4841 - DNA, 51 bp, synthetic construct
  misc_feature 1..51: note = Synthetic polynucleotide
  source 1..51: mol_type = other DNA
tgattttgacttcacggtaactgggrgagggagcccctcccggcgagagca

SEQ ID NO: 4842 - DNA, 51 bp, synthetic construct
  misc_feature 1..51: note = Synthetic polynucleotide
  source 1..51: mol_type = other DNA
cttgtcctgggacaaggaaggggagrggtgggagtgcgagggatccctccc

SEQ ID NO: 4843 - DNA, 51 bp, synthetic construct
  misc_feature 1..51: note = Synthetic polynucleotide
  source 1..51: mol_type = other DNA
tatttgaatccttgctctgcgatggrctattccctggctgcagccctcact

SEQ ID NO: 4844 - DNA, 51 bp, synthetic construct
  misc_feature 1..51: note = Synthetic polynucleotide
  source 1..51: mol_type = other DNA
cacgctgtttgtggagacatccctgrgacggccacaggacaaggatgccaa

SEQ ID NO: 4845 - DNA, 51 bp, synthetic construct
  misc_feature 1..51: note = Synthetic polynucleotide
  source 1..51: mol_type = other DNA
tcaaacctaagaaatatgtctgataraagagttactttgatagagtaaata

SEQ ID NO: 4846 - DNA, 51 bp, synthetic construct
  misc_feature 1..51: note = Synthetic polynucleotide
  source 1..51: mol_type = other DNA
atttgctgtaaatcaaatcatgggcrgccaagacttcctggtgctagcaat

SEQ ID NO: 4847 - DNA, 51 bp, synthetic construct
  misc_feature 1..51: note = Synthetic polynucleotide
  source 1..51: mol_type = other DNA
tgccacttccctgcggcccccacccrggtacatctttgagtccatcggtgc

SEQ ID NO: 4848 - DNA, 51 bp, synthetic construct
  misc_feature 1..51: note = Synthetic polynucleotide
  source 1..51: mol_type = other DNA
cgatcagccccttaacacgactcgtdtaaatgctgctgaaatagaaagcag

SEQ ID NO: 4849 - DNA, 51 bp, synthetic construct
  misc_feature 1..51: note = Synthetic polynucleotide
  source 1..51: mol_type = other DNA
tcccaggcctccctggagcacgaggrgggcaagatcctccgggcccagctg

SEQ ID NO: 4850 - DNA, 51 bp, synthetic construct
  misc_feature 1..51: note = Synthetic polynucleotide
  source 1..51: mol_type = other DNA
aacgagaggctggaggatgaggaggrgatgaatgctgagctcactgccaag

SEQ ID NO: 4851 - DNA, 51 bp, synthetic construct
  misc_feature 1..51: note = Synthetic polynucleotide
  source 1..51: mol_type = other DNA
ctggtcatgcaccagctgcgctgcartggtgtgctggagggcatccgcatc

SEQ ID NO: 4852 - DNA, 51 bp, synthetic construct
  misc_feature 1..51: note = Synthetic polynucleotide
  source 1..51: mol_type = other DNA
ctgcagaagaacaaggatcctctcartgagactgtcgtgggcttgtatcag

SEQ ID NO: 4853 - DNA, 51 bp, synthetic construct
  misc_feature 1..51: note = Synthetic polynucleotide
  source 1..51: mol_type = other DNA
catgtccatcctggaagaggagtgcrtgttccccaaggccaccgacatgac

SEQ ID NO: 4854 - DNA, 51 bp, synthetic construct
  misc_feature 1..51: note = Synthetic polynucleotide
  source 1..51: mol_type = other DNA
gctgcagcagttcttcaaccaccacrtgtttgtgctggagcaggaggagta

SEQ ID NO: 4855 - DNA, 51 bp, synthetic construct
  misc_feature 1..51: note = Synthetic polynucleotide
  source 1..51: mol_type = other DNA
ttcaactggatggtgacgcgcatcavtgccaccctggagaccaagcagcca

SEQ ID NO: 4856 - DNA, 51 bp, synthetic construct
  misc_feature 1..51: note = Synthetic polynucleotide
  source 1..51: mol_type = other DNA
agggtggcattgatgcgcgtcaccahccagttgaacatcctctcatacact

SEQ ID NO: 4857 - DNA, 51 bp, synthetic construct
  misc_feature 1..51: note = Synthetic polynucleotide
  source 1..51: mol_type = other DNA
ttcagaggagaaaaactccatgtatragctgacaggcgccatcatgcactt

SEQ ID NO: 4858 - DNA, 51 bp, synthetic construct
  misc_feature 1..51: note = Synthetic polynucleotide
  source 1..51: mol_type = other DNA
caggaaagttggcatctgcagacatrgagacctgtgagtgccatgaatctg

SEQ ID NO: 4859 - DNA, 51 bp, synthetic construct
  misc_feature 1..51: note = Synthetic polynucleotide
  source 1..51: mol_type = other DNA
attgcagccattggggaccgcagcargaaggaccagagcccgggcaaggta

SEQ ID NO: 4860 - DNA, 51 bp, synthetic construct
  misc_feature 1..51: note = Synthetic polynucleotide
  source 1..51: mol_type = other DNA
actgagtggaatggagggccgcaagvaaaagtttgagagctgagccttcct

SEQ ID NO: 4861 - DNA, 51 bp, synthetic construct
  misc_feature 1..51: note = Synthetic polynucleotide
  source 1..51: mol_type = other DNA
gcaggtgaagaaggaggacaccgagraggtgagtgtgggctaaggccagga

SEQ ID NO: 4862 - DNA, 51 bp, synthetic construct
  misc_feature 1..51: note = Synthetic polynucleotide
  source 1..51: mol_type = other DNA
tgactcttttcctccctctcatttcrggttcacagcaaaggactgaagcta

SEQ ID NO: 4863 - DNA, 51 bp, synthetic construct
  misc_feature 1..51: note = Synthetic polynucleotide
  source 1..51: mol_type = other DNA
gatgtgtgttctgaaattgtgaaccvtgagtctagtacttaatgatctgct

SEQ ID NO: 4864 - DNA, 51 bp, synthetic construct
  misc_feature 1..51: note = Synthetic polynucleotide
  source 1..51: mol_type = other DNA
tatttaaccacagttcttttcccgtrggctgatccttattcaaaatgggcc

SEQ ID NO: 4865 - DNA, 51 bp, synthetic construct
  misc_feature 1..51: note = Synthetic polynucleotide
  source 1..51: mol_type = other DNA
agttatatacatttttttcctcctcrgaacctaaaaataaaatatgtgttt

SEQ ID NO: 4866 - DNA, 51 bp, synthetic construct
  misc_feature 1..51: note = Synthetic polynucleotide
  source 1..51: mol_type = other DNA
ttctggggctgtttttgtctcctctrgcgtgcccaaagagctgaaaagatt

SEQ ID NO: 4867 - DNA, 51 bp, synthetic construct
  misc_feature 1..51: note = Synthetic polynucleotide
  source 1..51: mol_type = other DNA
ctgtaccaccatccactacaactacrtgtgtaacagttcctgcatgggcgg

SEQ ID NO: 4868 - DNA, 51 bp, synthetic construct
  misc_feature 1..51: note = Synthetic polynucleotide
  source 1..51: mol_type = other DNA
gatgcttgagtacgaaccggccaagrggttctccatccggcagatccggca

SEQ ID NO: 4869 - DNA, 51 bp, synthetic construct
  misc_feature 1..51: note = Synthetic polynucleotide
  source 1..51: mol_type = other DNA
tctctggaactggaggacctctcctrtgtacggataccaggatccttcaag

SEQ ID NO: 4870 - DNA, 51 bp, synthetic construct
  misc_feature 1..51: note = Synthetic polynucleotide
  source 1..51: mol_type = other DNA
atggaagagcctgtgaccatcccagrcaagcccaatagcgaagaggagatt

SEQ ID NO: 4871 - DNA, 51 bp, synthetic construct
  misc_feature 1..51: note = Synthetic polynucleotide
  source 1..51: mol_type = other DNA
gtatgagcaatcatctgttgttttcrggagggacgaagatggtgtgcagat

SEQ ID NO: 4872 - DNA, 51 bp, synthetic construct
  misc_feature 1..51: note = Synthetic polynucleotide
  source 1..51: mol_type = other DNA
tgaccagttgccatggcatcctactrcgagatcctagacgtgccgcgaagt

SEQ ID NO: 4873 - DNA, 51 bp, synthetic construct
  misc_feature 1..51: note = Synthetic polynucleotide
  source 1..51: mol_type = other DNA
aatctaattactgaagagactactcrtgttgttatgaaaacaggtatacca

SEQ ID NO: 4874 - DNA, 51 bp, synthetic construct
  misc_feature 1..51: note = Synthetic polynucleotide
  source 1..51: mol_type = other DNA
gtagatgaaatgatcagagaagcagrtattgatggagacggacaagtcaac

SEQ ID NO: 4875 - DNA, 51 bp, synthetic construct
  misc_feature 1..51: note = Synthetic polynucleotide
  source 1..51: mol_type = other DNA
ttgtattattatttttttaattttcrggggcgacagccagttttgtagtca

SEQ ID NO: 4876 - DNA, 51 bp, synthetic construct
  misc_feature 1..51: note = Synthetic polynucleotide
  source 1..51: mol_type = other DNA
tcctgcctctcttttctccccatacrggacgggctctacgagtgcattctc

SEQ ID NO: 4877 - DNA, 51 bp, synthetic construct
  misc_feature 1..51: note = Synthetic polynucleotide
  source 1..51: mol_type = other DNA
agtggaacagcatcctgagtatgagyacgtccaatcttgatgatctgtgca

SEQ ID NO: 4878 - DNA, 51 bp, synthetic construct
  misc_feature 1..51: note = Synthetic polynucleotide
  source 1..51: mol_type = other DNA
ataaaaacttgtttctattttatttrgagcttaacttagatagcagtaatt

SEQ ID NO: 4879 - DNA, 51 bp, synthetic construct
  misc_feature 1..51: note = Synthetic polynucleotide
  source 1..51: mol_type = other DNA
attcccagtcagaggcgctatgtgtrttattatagctacctgttaaagaat

SEQ ID NO: 4880 - DNA, 51 bp, synthetic construct
  misc_feature 1..51: note = Synthetic polynucleotide
  source 1..51: mol_type = other DNA
ctggtcgacggctacaatgtgcactrtggcgcccgctccatcaaacatgag

SEQ ID NO: 4881 - DNA, 51 bp, synthetic construct
  misc_feature 1..51: note = Synthetic polynucleotide
  source 1..51: mol_type = other DNA
tcctggaactcggacatgtccagcchgatgaagccctgtgtggaaacaagc

SEQ ID NO: 4882 - DNA, 51 bp, synthetic construct
  misc_feature 1..51: note = Synthetic polynucleotide
  source 1..51: mol_type = other DNA
ctcacccgtcccctctcctctgcagractatgaacacttatttaaggtgaa

SEQ ID NO: 4883 - DNA, 51 bp, synthetic construct
  misc_feature 1..51: note = Synthetic polynucleotide
  source 1..51: mol_type = other DNA
tacttagctgacttggagctagatgrggtggaagacttccttggagagctg

SEQ ID NO: 4884 - DNA, 51 bp, synthetic construct
  misc_feature 1..51: note = Synthetic polynucleotide
  source 1..51: mol_type = other DNA
ataggctgcacacggctggtgtccaygatggcggcgcggcggcggtctggc

SEQ ID NO: 4885 - DNA, 51 bp, synthetic construct
  misc_feature 1..51: note = Synthetic polynucleotide
  source 1..51: mol_type = other DNA
tcccatcttctgggcctccagaccaragagttacatctaccgtacccagga

SEQ ID NO: 4886 - DNA, 51 bp, synthetic construct
  misc_feature 1..51: note = Synthetic polynucleotide
  source 1..51: mol_type = other DNA
ctttggtccacctgggaatgggaagrcaatgctggtaagggttctcttcaa

SEQ ID NO: 4887 - DNA, 51 bp, synthetic construct
  misc_feature 1..51: note = Synthetic polynucleotide
  source 1..51: mol_type = other DNA
taaatccataaggttaagttggaccyacagagggaagggaaagagaagcgc

SEQ ID NO: 4888 - DNA, 51 bp, synthetic construct
  misc_feature 1..51: note = Synthetic polynucleotide
  source 1..51: mol_type = other DNA
tcatttacgtcttttgtgcatctatdggagaaggagaaggaagagttggta

SEQ ID NO: 4889 - DNA, 51 bp, synthetic construct
  misc_feature 1..51: note = Synthetic polynucleotide
  source 1..51: mol_type = other DNA
aacaccccctttctttttttttcaargcgaaggacaaggttgcccttttga

SEQ ID NO: 4890 - DNA, 51 bp, synthetic construct
  misc_feature 1..51: note = Synthetic polynucleotide
  source 1..51: mol_type = other DNA
ggagaaggcctgggaggagatacacrtttcgacaatgctgagaagtggact

SEQ ID NO: 4891 - DNA, 51 bp, synthetic construct
  misc_feature 1..51: note = Synthetic polynucleotide
  source 1..51: mol_type = other DNA
caccctagaactgctttcttttcagrtgccccatggtgtggtcactgcaaa

SEQ ID NO: 4892 - DNA, 51 bp, synthetic construct
  misc_feature 1..51: note = Synthetic polynucleotide
  source 1..51: mol_type = other DNA
tgctcgcatcccgcaggctcacctgyttctccggcgtggaagaagtaaggc

SEQ ID NO: 4893 - DNA, 51 bp, synthetic construct
  misc_feature 1..51: note = Synthetic polynucleotide
  source 1..51: mol_type = other DNA
taccacatcatccatgctgacatctrccgctggtttaacatttcgtttgat

SEQ ID NO: 4894 - DNA, 51 bp, synthetic construct
  misc_feature 1..51: note = Synthetic polynucleotide
  source 1..51: mol_type = other DNA
tctgtataaaaataatctctttttcrggaaaacatactaagagaatcactt

SEQ ID NO: 4895 - DNA, 51 bp, synthetic construct
  misc_feature 1..51: note = Synthetic polynucleotide
  source 1..51: mol_type = other DNA
tgcagaaagacttgaaggcgtatacrggaacaatattgatgatgtagtaag

SEQ ID NO: 4896 - DNA, 51 bp, synthetic construct
  misc_feature 1..51: note = Synthetic polynucleotide
  source 1..51: mol_type = other DNA
gttttaaggtttttggattcaaagcdtaaaaaccattacaagatatacaat

SEQ ID NO: 4897 - DNA, 51 bp, synthetic construct
  misc_feature 1..51: note = Synthetic polynucleotide
  source 1..51: mol_type = other DNA
tattctgaggttatctttttaccacrgttgcacaatatccttttgaagacc

SEQ ID NO: 4898 - DNA, 51 bp, synthetic construct
  misc_feature 1..51: note = Synthetic polynucleotide
  source 1..51: mol_type = other DNA
gaacttatcaaacccttttgtgaagrtcttgaccaatggctaagtgaagat

SEQ ID NO: 4899 - DNA, 51 bp, synthetic construct
  misc_feature 1..51: note = Synthetic polynucleotide
  source 1..51: mol_type = other DNA
caccagggagtaactattcccagtcrgaggcgctatgtgtattattatagc

SEQ ID NO: 4900 - DNA, 51 bp, synthetic construct
  misc_feature 1..51: note = Synthetic polynucleotide
  source 1..51: mol_type = other DNA
ttttcttttctttttttttttttttdggacaaaatgtttcacttttgggta

SEQ ID NO: 4901 - DNA, 51 bp, synthetic construct
  misc_feature 1..51: note = Synthetic polynucleotide
  source 1..51: mol_type = other DNA
atccgcgatcaatccctgcaggaggrgctggctcgccagcatgctaacgag

SEQ ID NO: 4902 - DNA, 51 bp, synthetic construct
  misc_feature 1..51: note = Synthetic polynucleotide
  source 1..51: mol_type = other DNA
gcttttaattgtgtttgtttttttcrgggagtcatttaatacttcatgatt

SEQ ID NO: 4903 - DNA, 51 bp, synthetic construct
  misc_feature 1..51: note = Synthetic polynucleotide
  source 1..51: mol_type = other DNA
agcctatggagttgtacttaaatgcrgacacaaggcaagtacattattttt

SEQ ID NO: 4904 - DNA, 51 bp, synthetic construct
  misc_feature 1..51: note = Synthetic polynucleotide
  source 1..51: mol_type = other DNA
cacaatgatgtcctaaaactgtgtgrctttggtaagttaaaaagaaattaa

SEQ ID NO: 4905 - DNA, 51 bp, synthetic construct
  misc_feature 1..51: note = Synthetic polynucleotide
  source 1..51: mol_type = other DNA
atatgataaaaatgtcttctcatttrggaaaagtcctgaaaatattagtca

SEQ ID NO: 4906 - DNA, 51 bp, synthetic construct
  misc_feature 1..51: note = Synthetic polynucleotide
  source 1..51: mol_type = other DNA
catcgtcagcttcttcgtgctcaacrtgttcgtgggcgtcgtggtcgagaa

SEQ ID NO: 4907 - DNA, 51 bp, synthetic construct
  misc_feature 1..51: note = Synthetic polynucleotide
  source 1..51: mol_type = other DNA
tgtttaatttgaattctatttcactrgttccttccaggaggtactttatgc

SEQ ID NO: 4908 - DNA, 51 bp, synthetic construct
  misc_feature 1..51: note = Synthetic polynucleotide
  source 1..51: mol_type = other DNA
aatactttgagaggttggagaaggtraaaataaatgtggggagatgatgag

SEQ ID NO: 4909 - DNA, 51 bp, synthetic construct
  misc_feature 1..51: note = Synthetic polynucleotide
  source 1..51: mol_type = other DNA
ccggactactgcctatcaccattgcrctttattatgtagtactgatgggac

SEQ ID NO: 4910 - DNA, 51 bp, synthetic construct
  misc_feature 1..51: note = Synthetic polynucleotide
  source 1..51: mol_type = other DNA
aaccctggaagctcagttaagggagrctgtgggaacccatctgttggaatt

SEQ ID NO: 4911 - DNA, 51 bp, synthetic construct
  misc_feature 1..51: note = Synthetic polynucleotide
  source 1..51: mol_type = other DNA
taattgttattatttttgtgtgtgcrggtttcattggtcagtttaacagca

SEQ ID NO: 4912 - DNA, 51 bp, synthetic construct
  misc_feature 1..51: note = Synthetic polynucleotide
  source 1..51: mol_type = other DNA
tttattgtgacgcttagcctggtagracttggactcgccaatgtggaagga

SEQ ID NO: 4913 - DNA, 51 bp, synthetic construct
  misc_feature 1..51: note = Synthetic polynucleotide
  source 1..51: mol_type = other DNA
gtcattggatagtgctccatggccahgaaaagagtatttaagacaatacag

SEQ ID NO: 4914 - DNA, 51 bp, synthetic construct
  misc_feature 1..51: note = Synthetic polynucleotide
  source 1..51: mol_type = other DNA
agaggtactcctccccacaccaggtrtggcactgctgagtttactgatgca

SEQ ID NO: 4915 - DNA, 51 bp, synthetic construct
  misc_feature 1..51: note = Synthetic polynucleotide
  source 1..51: mol_type = other DNA
tgtgtgaaagctggtagaaatcccadttatggctacacaagctttgatacc

SEQ ID NO: 4916 - DNA, 51 bp, synthetic construct
  misc_feature 1..51: note = Synthetic polynucleotide
  source 1..51: mol_type = other DNA
ttgcagccaatgtccagagggatatrtgtgtgtgaaagctggtagaaatcc

SEQ ID NO: 4917 - DNA, 51 bp, synthetic construct
  misc_feature 1..51: note = Synthetic polynucleotide
  source 1..51: mol_type = other DNA
acttgcagccaatgtccagagggatrtatgtgtgtgaaagctggtagaaat

SEQ ID NO: 4918 - DNA, 51 bp, synthetic construct
  misc_feature 1..51: note = Synthetic polynucleotide
  source 1..51: mol_type = other DNA
cactattttgacaaactgtgtgtttrtgacaatgagtaaccctcctgattg

SEQ ID NO: 4919 - DNA, 51 bp, synthetic construct
  misc_feature 1..51: note = Synthetic polynucleotide
  source 1..51: mol_type = other DNA
tagctattaagattttggtacattcrtatcctttttcaagtgattaatatt

SEQ ID NO: 4920 - DNA, 51 bp, synthetic construct
  misc_feature 1..51: note = Synthetic polynucleotide
  source 1..51: mol_type = other DNA
tcggcacctgtgacagccacaatccyccggatacccttggcaatggcttct

SEQ ID NO: 4921 - DNA, 51 bp, synthetic construct
  misc_feature 1..51: note = Synthetic polynucleotide
  source 1..51: mol_type = other DNA
tattctccatgctcgctcccgggccygcaacagagagagagagacctctca

SEQ ID NO: 4922 - DNA, 51 bp, synthetic construct
  misc_feature 1..51: note = Synthetic polynucleotide
  source 1..51: mol_type = other DNA
actgggaatgtgtatttgctttgcavactcctatcccccacctccaaacag

SEQ ID NO: 4923 - DNA, 51 bp, synthetic construct
  misc_feature 1..51: note = Synthetic polynucleotide
  source 1..51: mol_type = other DNA
actgaggggactggtggctgttgtcrggcttctcggtggaagggccatcgc

SEQ ID NO: 4924 - DNA, 51 bp, synthetic construct
  misc_feature 1..51: note = Synthetic polynucleotide
  source 1..51: mol_type = other DNA
ggagacctatgacttcgacagcatcrtgcattacgctcggaacacattctc

SEQ ID NO: 4925 - DNA, 51 bp, synthetic construct
  misc_feature 1..51: note = Synthetic polynucleotide
  source 1..51: mol_type = other DNA
ggagccaggacaaaggcttttgttcrggtagcacttcctttttctcctttc

SEQ ID NO: 4926 - DNA, 51 bp, synthetic construct
  misc_feature 1..51: note = Synthetic polynucleotide
  source 1..51: mol_type = other DNA
gtccaattcaatgttacagaaacccrctgcctatgtgcggcccatggacgg

SEQ ID NO: 4927 - DNA, 51 bp, synthetic construct
  misc_feature 1..51: note = Synthetic polynucleotide
  source 1..51: mol_type = other DNA
aatgtcaagctggccctggacatcgrgatcgccacctacaggaagctgcta

SEQ ID NO: 4928 - DNA, 51 bp, synthetic construct
  misc_feature 1..51: note = Synthetic polynucleotide
  source 1..51: mol_type = other DNA
tgaccgctttgccagctacatcgagraggttcgcttcctggaacagcaaaa

SEQ ID NO: 4929 - DNA, 51 bp, synthetic construct
  misc_feature 1..51: note = Synthetic polynucleotide
  source 1..51: mol_type = other DNA
atttgctgttcttcacagctttaggrtatgtatccaatgttttcttcaggt

SEQ ID NO: 4930 - DNA, 51 bp, synthetic construct
  misc_feature 1..51: note = Synthetic polynucleotide
  source 1..51: mol_type = other DNA
acctttctccagctaattcatctggrgatcaaacccgcaatccggaaccag

SEQ ID NO: 4931 - DNA, 51 bp, synthetic construct
  misc_feature 1..51: note = Synthetic polynucleotide
  source 1..51: mol_type = other DNA
cgtccccacagcctgatgttcaccarggtgaagctggagcaggtgctgaaa

SEQ ID NO: 4932 - DNA, 51 bp, synthetic construct
  misc_feature 1..51: note = Synthetic polynucleotide
  source 1..51: mol_type = other DNA
tgagctcaagaaagaaaagcaagtcraccaacgaattgaaaatatgatgca

SEQ ID NO: 4933 - DNA, 51 bp, synthetic construct
  misc_feature 1..51: note = Synthetic polynucleotide
  source 1..51: mol_type = other DNA
agaactgttaccattaagttgaagartgtgaattttgaagtaaaaactcgt

SEQ ID NO: 4934 - DNA, 51 bp, synthetic construct
  misc_feature 1..51: note = Synthetic polynucleotide
  source 1..51: mol_type = other DNA
atttgccattgctaaggaattgctaraaacagaaattgatgctgattttcc

SEQ ID NO: 4935 - DNA, 51 bp, synthetic construct
  misc_feature 1..51: note = Synthetic polynucleotide
  source 1..51: mol_type = other DNA
ggaaatcgagtagaaggtgtaaccayctggggaggtaggttcaggaaacca

SEQ ID NO: 4936 - DNA, 51 bp, synthetic construct
  misc_feature 1..51: note = Synthetic polynucleotide
  source 1..51: mol_type = other DNA
tgaaatcgtggtcatactggaaggcrtggtggaagccactgccatgacgac

SEQ ID NO: 4937 - DNA, 51 bp, synthetic construct
  misc_feature 1..51: note = Synthetic polynucleotide
  source 1..51: mol_type = other DNA
gacatcatccagcggctgtggaaggrctccggtatccaggcctgttttgag

SEQ ID NO: 4938 - DNA, 51 bp, synthetic construct
  misc_feature 1..51: note = Synthetic polynucleotide
  source 1..51: mol_type = other DNA
cagtccctgcaggtgtcttgcccctrtgactccatgaagcactgggggagg

SEQ ID NO: 4939 - DNA, 51 bp, synthetic construct
  misc_feature 1..51: note = Synthetic polynucleotide
  source 1..51: mol_type = other DNA
actggacatagcaaggaagctggatrtgtatggcatcaggcctcaccccgc

SEQ ID NO: 4940 - DNA, 51 bp, synthetic construct
  misc_feature 1..51: note = Synthetic polynucleotide
  source 1..51: mol_type = other DNA
tcactctcaacagtaatcttctccayggtcaagtcagcctcaggggagctc

SEQ ID NO: 4941 - DNA, 51 bp, synthetic construct
  misc_feature 1..51: note = Synthetic polynucleotide
  source 1..51: mol_type = other DNA
agtttcttccacttggaccaccaccrcctcggccacaggtctacccacctt

SEQ ID NO: 4942 - DNA, 51 bp, synthetic construct
  misc_feature 1..51: note = Synthetic polynucleotide
  source 1..51: mol_type = other DNA
gccaactcggaggagatcgccttctrtgggggccatgaggtggggcaggtt

SEQ ID NO: 4943 - DNA, 51 bp, synthetic construct
  misc_feature 1..51: note = Synthetic polynucleotide
  source 1..51: mol_type = other DNA
aggacgcctaccatgggctggctgcdctgggagcgcttcatgtgcaacctt

SEQ ID NO: 4944 - DNA, 51 bp, synthetic construct
  misc_feature 1..51: note = Synthetic polynucleotide
  source 1..51: mol_type = other DNA
ccctgaccctgtccctctcctggccrggaaataccacacacacttgctaca

SEQ ID NO: 4945 - DNA, 51 bp, synthetic construct
  misc_feature 1..51: note = Synthetic polynucleotide
  source 1..51: mol_type = other DNA
ttgctcaattccagtctttaccaccyaaaaaacatataaagcacttgctca

SEQ ID NO: 4946 - DNA, 51 bp, synthetic construct
  misc_feature 1..51: note = Synthetic polynucleotide
  source 1..51: mol_type = other DNA
cgagtatcacgtgatccggcacgccrtgaacctggaggccgtgaacaccta

SEQ ID NO: 4947 - DNA, 51 bp, synthetic construct
  misc_feature 1..51: note = Synthetic polynucleotide
  source 1..51: mol_type = other DNA
acaattgttaacttccttctttgtcrggggtacatgatggatttgacagcc

SEQ ID NO: 4948 - DNA, 51 bp, synthetic construct
  misc_feature 1..51: note = Synthetic polynucleotide
  source 1..51: mol_type = other DNA
ctcaggctcccttggttctctctgcrgtttacatgagctggtgaaacatga

SEQ ID NO: 4949 - DNA, 51 bp, synthetic construct
  misc_feature 1..51: note = Synthetic polynucleotide
  source 1..51: mol_type = other DNA
tctttcttttttattccccaccccarggactgaggaggagaagaaagactg

SEQ ID NO: 4950 - DNA, 51 bp, synthetic construct
  misc_feature 1..51: note = Synthetic polynucleotide
  source 1..51: mol_type = other DNA
ctgctgctggctctgggcgctgcccygccgcagctgcccgctcttctcgga

SEQ ID NO: 4951 - DNA, 51 bp, synthetic construct
  misc_feature 1..51: note = Synthetic polynucleotide
  source 1..51: mol_type = other DNA
atgctgtttttttccctttcccaacrgttgttagccctgaagatctggcta

SEQ ID NO: 4952 - DNA, 51 bp, synthetic construct
  misc_feature 1..51: note = Synthetic polynucleotide
  source 1..51: mol_type = other DNA
gttccccctcccccaggctgggagtrtagcatcaccatccccccggagcgg

SEQ ID NO: 4953 - DNA, 51 bp, synthetic construct
  misc_feature 1..51: note = Synthetic polynucleotide
  source 1..51: mol_type = other DNA
ctgccataaccagcttcgtgtctccrgggcggcgtgatggatgacaagagt

SEQ ID NO: 4954 - DNA, 51 bp, synthetic construct
  misc_feature 1..51: note = Synthetic polynucleotide
  source 1..51: mol_type = other DNA
attacatttcattataattcttttcrggtaacagaaagaaagcaacagttg

SEQ ID NO: 4955 - DNA, 51 bp, synthetic construct
  misc_feature 1..51: note = Synthetic polynucleotide
  source 1..51: mol_type = other DNA
gtgtactcctgtgagtggcctctttrtatgtggccctttcaaaaggtgaga

SEQ ID NO: 4956 - DNA, 51 bp, synthetic construct
  misc_feature 1..51: note = Synthetic polynucleotide
  source 1..51: mol_type = other DNA
ctctgctctctcccttggctactccrggttcttctgtgacccagttgctgg

SEQ ID NO: 4957 - DNA, 51 bp, synthetic construct
  misc_feature 1..51: note = Synthetic polynucleotide
  source 1..51: mol_type = other DNA
ggggttggaatgacccagatatggtraaaacttgagccctccttgttcaag

SEQ ID NO: 4958 - DNA, 51 bp, synthetic construct
  misc_feature 1..51: note = Synthetic polynucleotide
  source 1..51: mol_type = other DNA
gcaggtgggatggagagcatgtccartgttccatatgtaatgaacagagga

SEQ ID NO: 4959 - DNA, 51 bp, synthetic construct
  misc_feature 1..51: note = Synthetic polynucleotide
  source 1..51: mol_type = other DNA
gtctggttaaacacctcttaggtaarcagctcctgaaagacaagtctatcc

SEQ ID NO: 4960 - DNA, 51 bp, synthetic construct
  misc_feature 1..51: note = Synthetic polynucleotide
  source 1..51: mol_type = other DNA
ggctctgaccccttgtcctatgtccdggtcattgctccctggaggatgcct

SEQ ID NO: 4961 - DNA, 51 bp, synthetic construct
  misc_feature 1..51: note = Synthetic polynucleotide
  source 1..51: mol_type = other DNA
ttctgatctaacaatcctcattcccyaagagagaaaagatgattatgacta

SEQ ID NO: 4962 - DNA, 51 bp, synthetic construct
  misc_feature 1..51: note = Synthetic polynucleotide
  source 1..51: mol_type = other DNA
tcttttttacttttttgatgccaatrggaatctgcaagcagaatatgaccg

SEQ ID NO: 4963 - DNA, 51 bp, synthetic construct
  misc_feature 1..51: note = Synthetic polynucleotide
  source 1..51: mol_type = other DNA
acaagtttgctggtgtatggaagacyatacaaaaaggaaaaaaaaatcaaa

SEQ ID NO: 4964 - DNA, 51 bp, synthetic construct
  misc_feature 1..51: note = Synthetic polynucleotide
  source 1..51: mol_type = other DNA
tcagaatcaaaggcatgggaggttgrtacctgccggggccattacaacaat

SEQ ID NO: 4965 - DNA, 51 bp, synthetic construct
  misc_feature 1..51: note = Synthetic polynucleotide
  source 1..51: mol_type = other DNA
cgtcagctaattacatctttccttgrcagctcacaatccaggtgagtgaag

SEQ ID NO: 4966 - DNA, 51 bp, synthetic construct
  misc_feature 1..51: note = Synthetic polynucleotide
  source 1..51: mol_type = other DNA
tgccatctctttgattttctgctcahagaactcctgctcttgttgcacagc

SEQ ID NO: 4967 - DNA, 51 bp, synthetic construct
  misc_feature 1..51: note = Synthetic polynucleotide
  source 1..51: mol_type = other DNA
catcttagttagcgtgtcctctgaarggtacttggtaagtgtggaaagtag

SEQ ID NO: 4968 - DNA, 51 bp, synthetic construct
  misc_feature 1..51: note = Synthetic polynucleotide
  source 1..51: mol_type = other DNA
aaatgcaactgctttaccaccaggtvatgttgttaatggaacgattggcaa

SEQ ID NO: 4969 - DNA, 51 bp, synthetic construct
  misc_feature 1..51: note = Synthetic polynucleotide
  source 1..51: mol_type = other DNA
gaacctgcgaaggacatcggcttcarcgtcgccgtccttctgacaaacctc

SEQ ID NO: 4970 - DNA, 51 bp, synthetic construct
  misc_feature 1..51: note = Synthetic polynucleotide
  source 1..51: mol_type = other DNA
agacagttcatatttgacgtggtcarcgaaggcggagagaaagagaagatg

SEQ ID NO: 4971 - DNA, 51 bp, synthetic construct
  misc_feature 1..51: note = Synthetic polynucleotide
  source 1..51: mol_type = other DNA
acagtgacatggcttctctttttccrgggtgaaggtggtgcccccggactt

SEQ ID NO: 4972 - DNA, 51 bp, synthetic construct
  misc_feature 1..51: note = Synthetic polynucleotide
  source 1..51: mol_type = other DNA
cttagggggccaggacatcttcatgrcagaggagcagaagaagtactacaa

SEQ ID NO: 4973 - DNA, 51 bp, synthetic construct
  misc_feature 1..51: note = Synthetic polynucleotide
  source 1..51: mol_type = other DNA
ctctttgcacttagggggccaggacrtcttcatgacagaggagcagaagaa

SEQ ID NO: 4974 - DNA, 51 bp, synthetic construct
  misc_feature 1..51: note = Synthetic polynucleotide
  source 1..51: mol_type = other DNA
ggtgagcctgacccattatctcgacrggtcctgaatctcttcctggccttg

SEQ ID NO: 4975 - DNA, 51 bp, synthetic construct
  misc_feature 1..51: note = Synthetic polynucleotide
  source 1..51: mol_type = other DNA
gatggtggcttggttttgctcctcayaggccattgcgaccacggccaggat

SEQ ID NO: 4976 - DNA, 51 bp, synthetic construct
  misc_feature 1..51: note = Synthetic polynucleotide
  source 1..51: mol_type = other DNA
ttcactgatcactctcatccttcacrgttttttgaagaggcgcagtctact

SEQ ID NO: 4977 - DNA, 51 bp, synthetic construct
  misc_feature 1..51: note = Synthetic polynucleotide
  misc_difference 26: note = n is a, c, g, t or u
  source 1..51: mol_type = other DNA
tggtccagcctggagatcaccttcancctgcgagatgtgagttggctgccc

SEQ ID NO: 4978 - DNA, 51 bp, synthetic construct
  misc_feature 1..51: note = Synthetic polynucleotide
  source 1..51: mol_type = other DNA
gtctctcccaacaccaactcagagargatcttctccatctgcgtcatgctc

SEQ ID NO: 4979 - DNA, 51 bp, synthetic construct
  misc_feature 1..51: note = Synthetic polynucleotide
  source 1..51: mol_type = other DNA
ttcggcaacgtctctcccaacaccadctcagagaagatcttctccatctgc

SEQ ID NO: 4980 - DNA, 51 bp, synthetic construct
  misc_feature 1..51: note = Synthetic polynucleotide
  source 1..51: mol_type = other DNA
gggcttcggcaacgtctctcccaacrccaactcagagaagatcttctccat

SEQ ID NO: 4981 - DNA, 51 bp, synthetic construct
  misc_feature 1..51: note = Synthetic polynucleotide
  source 1..51: mol_type = other DNA
ccacacctccgccttccccgggtgcrggtcctgtccctgggcgccgacgtg

SEQ ID NO: 4982 - DNA, 51 bp, synthetic construct
  misc_feature 1..51: note = Synthetic polynucleotide
  source 1..51: mol_type = other DNA
gagcgcaaagtggaaatcgccttctvccggaaagatggtaggagcgggccg

SEQ ID NO: 4983 - DNA, 51 bp, synthetic construct
  misc_feature 1..51: note = Synthetic polynucleotide
  source 1..51: mol_type = other DNA
ggagaactgcgccgtcatctactgcdacgacggcttctgcgagctgtgcgg

SEQ ID NO: 4984 - DNA, 51 bp, synthetic construct
  misc_feature 1..51: note = Synthetic polynucleotide
  source 1..51: mol_type = other DNA
agaatcctgtgaagcagctccagctrtgtgtgaagaagaggacagcactgc

SEQ ID NO: 4985 - DNA, 51 bp, synthetic construct
  misc_feature 1..51: note = Synthetic polynucleotide
  source 1..51: mol_type = other DNA
gctccccctctcctgcactccacagrcctcatcgtggtcgtggcctccatg

SEQ ID NO: 4986 - DNA, 51 bp, synthetic construct
  misc_feature 1..51: note = Synthetic polynucleotide
  source 1..51: mol_type = other DNA
gggagcctcctgtccattccttcccvggggattcttggctcggggtttgcc

SEQ ID NO: 4987 - DNA, 51 bp, synthetic construct
  misc_feature 1..51: note = Synthetic polynucleotide
  source 1..51: mol_type = other DNA
caatctcctctcctctctccactgcrggctgcgggaacaccatcgggccac

SEQ ID NO: 4988 - DNA, 51 bp, synthetic construct
  misc_feature 1..51: note = Synthetic polynucleotide
  source 1..51: mol_type = other DNA
atcggcgcccgcctgaaccgagtagragacaaggtaggctcacgcgccggc

SEQ ID NO: 4989 - DNA, 51 bp, synthetic construct
  misc_feature 1..51: note = Synthetic polynucleotide
  source 1..51: mol_type = other DNA
tgcatgtgtcccgccggcttccagtrtgaacagttcagtggaggatgccaa

SEQ ID NO: 4990 - DNA, 51 bp, synthetic construct
  misc_feature 1..51: note = Synthetic polynucleotide
  source 1..51: mol_type = other DNA
ttttgcttttttctccctccccccargatattgatgagtgctcccttccga

SEQ ID NO: 4991 - DNA, 51 bp, synthetic construct
  misc_feature 1..51: note = Synthetic polynucleotide
  source 1..51: mol_type = other DNA
ggtcatttccattttgcagatattgrtgagtgtcagagagatcctctccta

SEQ ID NO: 4992 - DNA, 51 bp, synthetic construct
  misc_feature 1..51: note = Synthetic polynucleotide
  source 1..51: mol_type = other DNA
agtcaacgtagaagttacgcgcataraagtgttcgatgcagatgaaatagg

SEQ ID NO: 4993 - DNA, 51 bp, synthetic construct
  misc_feature 1..51: note = Synthetic polynucleotide
  source 1..51: mol_type = other DNA
tgagcaaaggggttctgaggtccatrccaagaagacggtgatgatcaagac

SEQ ID NO: 4994 - DNA, 51 bp, synthetic construct
  misc_feature 1..51: note = Synthetic polynucleotide
  source 1..51: mol_type = other DNA
agaaatatgcatctgcttcttccccrggttaaccagcttcgtggcatcctc

SEQ ID NO: 4995 - DNA, 51 bp, synthetic construct
  misc_feature 1..51: note = Synthetic polynucleotide
  source 1..51: mol_type = other DNA
gatatgaatatttcactcttttctcrggtcctccctcaccaccccttgacc

SEQ ID NO: 4996 - DNA, 51 bp, synthetic construct
  misc_feature 1..51: note = Synthetic polynucleotide
  source 1..51: mol_type = other DNA
acttcatatttcagtttccctccctraagtacatccacgttatgatttaga

SEQ ID NO: 4997 - DNA, 51 bp, synthetic construct
  misc_feature 1..51: note = Synthetic polynucleotide
  source 1..51: mol_type = other DNA
tacttcgaggggctccgcaagcactrcctgctcccggccatcgagtgagtg

SEQ ID NO: 4998 - DNA, 51 bp, synthetic construct
  misc_feature 1..51: note = Synthetic polynucleotide
  source 1..51: mol_type = other DNA
tctatttttcaggtatcctggtcagrtataggaggactggaaagtatcaaa

SEQ ID NO: 4999 - DNA, 51 bp, synthetic construct
  misc_feature 1..51: note = Synthetic polynucleotide
  source 1..51: mol_type = other DNA
acttttgatgcttgtttaattagtgragaattggcttatggatgtacaggg

SEQ ID NO: 5000 - DNA, 51 bp, synthetic construct
  misc_feature 1..51: note = Synthetic polynucleotide
  source 1..51: mol_type = other DNA
cctaaagaaaatgttttaattggtgrcggagctggtttcaaagttgcaatg

SEQ ID NO: 5001 - DNA, 51 bp, synthetic construct
  misc_feature 1..51: note = Synthetic polynucleotide
  source 1..51: mol_type = other DNA
gactgttctggaaatcttttatttcrggacacctcctacctgttcatcact

SEQ ID NO: 5002 - DNA, 51 bp, synthetic construct
  misc_feature 1..51: note = Synthetic polynucleotide
  source 1..51: mol_type = other DNA
catacctatggaggatctttcctctrtcatttgaatgaaggtgaaccccta

SEQ ID NO: 5003 - DNA, 51 bp, synthetic construct
  misc_feature 1..51: note = Synthetic polynucleotide
  source 1..51: mol_type = other DNA
aaaaatgggacaagatggccatgacrgaggagcaaaagttattgctacagg

SEQ ID NO: 5004 - DNA, 51 bp, synthetic construct
  misc_feature 1..51: note = Synthetic polynucleotide
  source 1..51: mol_type = other DNA
tttaggccctggaccatccgccagtrtgctggttttagtactgtggaagaa

SEQ ID NO: 5005 - DNA, 51 bp, synthetic construct
  misc_feature 1..51: note = Synthetic polynucleotide
  source 1..51: mol_type = other DNA
tcaggccatccagatcctgggcggcrtgggctacgtgacagagatgccggc

SEQ ID NO: 5006 - DNA, 51 bp, synthetic construct
  misc_feature 1..51: note = Synthetic polynucleotide
  source 1..51: mol_type = other DNA
tccagctcggccgcctgtcagtgcartgctgccccatgtggtgctcacctt

SEQ ID NO: 5007 - DNA, 51 bp, synthetic construct
  misc_feature 1..51: note = Synthetic polynucleotide
  source 1..51: mol_type = other DNA
gacatttttacactgcttgcccagaragccagaagaagtggatgatgaagt

SEQ ID NO: 5008 - DNA, 51 bp, synthetic construct
  misc_feature 1..51: note = Synthetic polynucleotide
  source 1..51: mol_type = other DNA
acactggtcatctctggctcgggacrctgtgccctggaggccgccctggtc

SEQ ID NO: 5009 - DNA, 51 bp, synthetic construct
  misc_feature 1..51: note = Synthetic polynucleotide
  source 1..51: mol_type = other DNA
cacccacagccgtccctgcttcctcrgggcctggcccagcacaagccagtg

SEQ ID NO: 5010 - DNA, 51 bp, synthetic construct
  misc_feature 1..51: note = Synthetic polynucleotide
  source 1..51: mol_type = other DNA
cgtcccgagcaaaccacccatctacrggcatcgacatcctgtactcgggct

SEQ ID NO: 5011 - DNA, 51 bp, synthetic construct
  misc_feature 1..51: note = Synthetic polynucleotide
  source 1..51: mol_type = other DNA
tggaccaagccccctcgtgtcttccrggtaccatcacacaatccccgtcat

SEQ ID NO: 5012 - DNA, 51 bp, synthetic construct
  misc_feature 1..51: note = Synthetic polynucleotide
  source 1..51: mol_type = other DNA
ctcctgagggcctccctttccccgcrgctgtgaggtggagcagtgggactc

SEQ ID NO: 5013 - DNA, 51 bp, synthetic construct
  misc_feature 1..51: note = Synthetic polynucleotide
  source 1..51: mol_type = other DNA
caccatgtccttgttggcagctaacracttgctggctggcctgagagggga

SEQ ID NO: 5014 - DNA, 51 bp, synthetic construct
  misc_feature 1..51: note = Synthetic polynucleotide
  source 1..51: mol_type = other DNA
gtgggaattgacgcagccattgccartgcttttcgacgaattctgctagct

SEQ ID NO: 5015 - DNA, 51 bp, synthetic construct
  misc_feature 1..51: note = Synthetic polynucleotide
  source 1..51: mol_type = other DNA
gctgtggtgctgcagctgtcccagcrgctgtctggcatcaacgctgtgagt

SEQ ID NO: 5016 - DNA, 51 bp, synthetic construct
  misc_feature 1..51: note = Synthetic polynucleotide
  source 1..51: mol_type = other DNA
ataacagtgtggtttgtttctccgcrgaagctgacgggtcgcctcatgctg

SEQ ID NO: 5017 - DNA, 51 bp, synthetic construct
  misc_feature 1..51: note = Synthetic polynucleotide
  source 1..51: mol_type = other DNA
actttgtcttccttgacgatattctrctttattcaatatgctcattatgtg

SEQ ID NO: 5018 - DNA, 51 bp, synthetic construct
  misc_feature 1..51: note = Synthetic polynucleotide
  source 1..51: mol_type = other DNA
aataaatgtttgcaatggcctccagrtaattcttcctttgaaataaatatc

SEQ ID NO: 5019 - DNA, 51 bp, synthetic construct
  misc_feature 1..51: note = Synthetic polynucleotide
  source 1..51: mol_type = other DNA
catgaatgtacttctggtttgtctgrtcttttggctaatattcagtatcat

SEQ ID NO: 5020 - DNA, 51 bp, synthetic construct
  misc_feature 1..51: note = Synthetic polynucleotide
  source 1..51: mol_type = other DNA
taatttcaaccagcagaaaaagaagdtaagtatttctaatattttctctcc

SEQ ID NO: 5021 - DNA, 51 bp, synthetic construct
  misc_feature 1..51: note = Synthetic polynucleotide
  source 1..51: mol_type = other DNA
atcctggctgtggtggccatggcctrcgaggaacagaatcaggccaccttg

SEQ ID NO: 5022 - DNA, 51 bp, synthetic construct
  misc_feature 1..51: note = Synthetic polynucleotide
  source 1..51: mol_type = other DNA
gggattgaggccagtctagatgtgcrgtacctgatgagtgctggtgccaac

SEQ ID NO: 5023 - DNA, 51 bp, synthetic construct
  misc_feature 1..51: note = Synthetic polynucleotide
  source 1..51: mol_type = other DNA
ggagaagaggaagaggccgttgctgyccaggaagaggcgcttgcgcttctg

SEQ ID NO: 5024 - DNA, 51 bp, synthetic construct
  misc_feature 1..51: note = Synthetic polynucleotide
  source 1..51: mol_type = other DNA
gggccccgcatacctggtcaagaggytggtgatctgcaaggccagggcagc

SEQ ID NO: 5025 - DNA, 51 bp, synthetic construct
  misc_feature 1..51: note = Synthetic polynucleotide
  source 1..51: mol_type = other DNA
gtgggcatcagccgtgagcatgccaraatcttcaactacggccgcatctat

SEQ ID NO: 5026 - DNA, 51 bp, synthetic construct
  misc_feature 1..51: note = Synthetic polynucleotide
  source 1..51: mol_type = other DNA
cacaagggtgtagccaggtggggccygcaccatggctttcaactcactgcc

SEQ ID NO: 5027 - DNA, 51 bp, synthetic construct
  misc_feature 1..51: note = Synthetic polynucleotide
  source 1..51: mol_type = other DNA
gagcagccagctggacattgacaacrtggcgggcgtattctacatgctggc

SEQ ID NO: 5028 - DNA, 51 bp, synthetic construct
  misc_feature 1..51: note = Synthetic polynucleotide
  source 1..51: mol_type = other DNA
cttcttcgctgtcatattcctggctrgctacacagccaatctggctgcctt

SEQ ID NO: 5029 - DNA, 51 bp, synthetic construct
  misc_feature 1..51: note = Synthetic polynucleotide
  source 1..51: mol_type = other DNA
gtcgggtcgccgtccagcctgcagcrtgagcgcccccagcgcgacccccat

SEQ ID NO: 5030 - DNA, 51 bp, synthetic construct
  misc_feature 1..51: note = Synthetic polynucleotide
  source 1..51: mol_type = other DNA
ctgaccaccattggctacggggacargtacccccagacctggaacggcagg

SEQ ID NO: 5031 - DNA, 51 bp, synthetic construct
  misc_feature 1..51: note = Synthetic polynucleotide
  source 1..51: mol_type = other DNA
gcgctccggagcctgcgcttcctgcrgattctgcggatgatccgcatggac

SEQ ID NO: 5032 - DNA, 51 bp, synthetic construct
  misc_feature 1..51: note = Synthetic polynucleotide
  source 1..51: mol_type = other DNA
ctgagagcgcgcgttccctgcccccrggttcctcctggttttctcctgcct

SEQ ID NO: 5033 - DNA, 51 bp, synthetic construct
  misc_feature 1..51: note = Synthetic polynucleotide
  source 1..51: mol_type = other DNA
gtcaccgtcagcgtgctggacaccartgacaatccgccggtcatcaacctg

SEQ ID NO: 5034 - DNA, 51 bp, synthetic construct
  misc_feature 1..51: note = Synthetic polynucleotide
  source 1..51: mol_type = other DNA
cttagtatcaaggtgaccgactccadtgacaacaacccggtgtttagcgag

SEQ ID NO: 5035 - DNA, 51 bp, synthetic construct
  misc_feature 1..51: note = Synthetic polynucleotide
  source 1..51: mol_type = other DNA
ttcacagcagaaggtgcactgacctbgagcttcacaaacatatgtgcttgt

SEQ ID NO: 5036 - DNA, 51 bp, synthetic construct
  misc_feature 1..51: note = Synthetic polynucleotide
  source 1..51: mol_type = other DNA
tctcctccccaggtacaattttgtgrtgctggccctgtcctcctcattcct

SEQ ID NO: 5037 - DNA, 51 bp, synthetic construct
  misc_feature 1..51: note = Synthetic polynucleotide
  source 1..51: mol_type = other DNA
tctgagtgcctgttctcgctcatcartggggacgacatgtttgtgacgttc

SEQ ID NO: 5038 - DNA, 51 bp, synthetic construct
  misc_feature 1..51: note = Synthetic polynucleotide
  source 1..51: mol_type = other DNA
ttcattgaagaactaataaaaaattrtgatgggaaagtacacggggataga

SEQ ID NO: 5039 - DNA, 51 bp, synthetic construct
  misc_feature 1..51: note = Synthetic polynucleotide
  source 1..51: mol_type = other DNA
accacggatagagtaaaagttatggyaagaggagagcctggaactgccaaa

SEQ ID NO: 5040 - DNA, 51 bp, synthetic construct
  misc_feature 1..51: note = Synthetic polynucleotide
  source 1..51: mol_type = other DNA
cccaccccatccccatttcccccccrgcaaggcttcctgagccgacggcta

SEQ ID NO: 5041 - DNA, 51 bp, synthetic construct
  misc_feature 1..51: note = Synthetic polynucleotide
  source 1..51: mol_type = other DNA
gataggcactgagatgatcatcaccraggccggcaggtaatgggcaagctg

SEQ ID NO: 5042 - DNA, 51 bp, synthetic construct
  misc_feature 1..51: note = Synthetic polynucleotide
  source 1..51: mol_type = other DNA
gaggcatctggcttctgttacgtcartgatatcgtcttggccatcctggaa

SEQ ID NO: 5043 - DNA, 51 bp, synthetic construct
  misc_feature 1..51: note = Synthetic polynucleotide
  source 1..51: mol_type = other DNA
tggtccacctgggaatgggaagacartgctggtaagggttctcttcaaatt

SEQ ID NO: 5044 - DNA, 51 bp, synthetic construct
  misc_feature 1..51: note = Synthetic polynucleotide
  source 1..51: mol_type = other DNA
tatcaagaggatggattcgacttagrcttgacctgtatccatttctgcggc

SEQ ID NO: 5045 - DNA, 51 bp, synthetic construct
  misc_feature 1..51: note = Synthetic polynucleotide
  source 1..51: mol_type = other DNA
gggtcctgcaggtatgtgacagggcrcatctgggcctgtcctccaagtgaa

SEQ ID NO: 5046 - DNA, 51 bp, synthetic construct
  misc_feature 1..51: note = Synthetic polynucleotide
  source 1..51: mol_type = other DNA
gatccagaagattttgctgatgagcrgagccttgtgggccgcttcattcat

SEQ ID NO: 5047 - DNA, 51 bp, synthetic construct
  misc_feature 1..51: note = Synthetic polynucleotide
  source 1..51: mol_type = other DNA
ggcatcatcgtggccaatgtcccagrgggtctgctggccactgtcactgta

SEQ ID NO: 5048 - DNA, 51 bp, synthetic construct
  misc_feature 1..51: note = Synthetic polynucleotide
  source 1..51: mol_type = other DNA
tctcaggagctggtcactgcctggtrcatcggcttcctttgtctcatcctg

SEQ ID NO: 5049 - DNA, 51 bp, synthetic construct
  misc_feature 1..51: note = Synthetic polynucleotide
  source 1..51: mol_type = other DNA
actaaatcttacatatttgaaggtartcttagacccattaaaacaagatgt

SEQ ID NO: 5050 - DNA, 51 bp, synthetic construct
  misc_feature 1..51: note = Synthetic polynucleotide
  source 1..51: mol_type = other DNA
ttctgcaagaaatgcattctacgcarccttggtcgaaaggagttgtccaca

SEQ ID NO: 5051 - DNA, 51 bp, synthetic construct
  misc_feature 1..51: note = Synthetic polynucleotide
  source 1..51: mol_type = other DNA
cccaccattagcttcttcctggagcrtttcacgcacgctcgcgtggaggcg

SEQ ID NO: 5052 - DNA, 51 bp, synthetic construct
  misc_feature 1..51: note = Synthetic polynucleotide
  source 1..51: mol_type = other DNA
ctctagagaatcaggccgtccgagcyaacagtgatagaaaatacttctaga

SEQ ID NO: 5053 - DNA, 51 bp, synthetic construct
  misc_feature 1..51: note = Synthetic polynucleotide
  source 1..51: mol_type = other DNA
tcgctttcccatccttttccttcccrgggctactttggagacccctggaat

SEQ ID NO: 5054 - DNA, 51 bp, synthetic construct
  misc_feature 1..51: note = Synthetic polynucleotide
  source 1..51: mol_type = other DNA
caattggagtcagagtcccaaagacrtgggtaagtttcaaaaactttagca

SEQ ID NO: 5055 - DNA, 51 bp, synthetic construct
  misc_feature 1..51: note = Synthetic polynucleotide
  source 1..51: mol_type = other DNA
cgtgcccttctctgctggccccaggractgtataggtttgtatccatctga

SEQ ID NO: 5056 - DNA, 51 bp, synthetic construct
  misc_feature 1..51: note = Synthetic polynucleotide
  source 1..51: mol_type = other DNA
acaaagaaggtggtgaggtagtaggygggcagccggctcatgaacggcagg

SEQ ID NO: 5057 - DNA, 51 bp, synthetic construct
  misc_feature 1..51: note = Synthetic polynucleotide
  source 1..51: mol_type = other DNA
caggggcagctctacccagagcccaytgatggtcacccaggagcccattcc

SEQ ID NO: 5058 - DNA, 51 bp, synthetic construct
  misc_feature 1..51: note = Synthetic polynucleotide
  source 1..51: mol_type = other DNA
caagctgtctacctcttcgtgcaatrtatcatcatggtgaacctgttgatt

SEQ ID NO: 5059 - DNA, 51 bp, synthetic construct
  misc_feature 1..51: note = Synthetic polynucleotide
  source 1..51: mol_type = other DNA
aataaaccctctgcttttgctctatrgttaatcagctcaaagatttgttgc

SEQ ID NO: 5060 - DNA, 51 bp, synthetic construct
  misc_feature 1..51: note = Synthetic polynucleotide
  source 1..51: mol_type = other DNA
caagaacatgatatcactaatttctrtatgctcaccctagacaaagtaagt

SEQ ID NO: 5061 - DNA, 51 bp, synthetic construct
  misc_feature 1..51: note = Synthetic polynucleotide
  source 1..51: mol_type = other DNA
gggatgctgctcctcgtggaggtcartgtcatcagggtgagggtaagcagg

SEQ ID NO: 5062 - DNA, 51 bp, synthetic construct
  misc_feature 1..51: note = Synthetic polynucleotide
  source 1..51: mol_type = other DNA
gatggcagtggcagctcctccaatgyttgtgaagatcacttctgcaatcag

SEQ ID NO: 5063 - DNA, 51 bp, synthetic construct
  misc_feature 1..51: note = Synthetic polynucleotide
  source 1..51: mol_type = other DNA
attttctagttttcttcctctttccrgggggagatggggtacccaggcctg

SEQ ID NO: 5064 - DNA, 51 bp, synthetic construct
  misc_feature 1..51: note = Synthetic polynucleotide
  source 1..51: mol_type = other DNA
cagcatgccctgctctgtgcctcacrgaactacaggatctcatgcacatct

SEQ ID NO: 5065 - DNA, 51 bp, synthetic construct
  misc_feature 1..51: note = Synthetic polynucleotide
  source 1..51: mol_type = other DNA
tgacctgacgcgatctctgtctgacracatcaacctgcctcagggagtgcg

SEQ ID NO: 5066 - DNA, 51 bp, synthetic construct
  misc_feature 1..51: note = Synthetic polynucleotide
  source 1..51: mol_type = other DNA
tccaacacgtccaccttcgtgccctrtgagatcaaagtccaggccgtcaac

SEQ ID NO: 5067 - DNA, 51 bp, synthetic construct
  misc_feature 1..51: note = Synthetic polynucleotide
  source 1..51: mol_type = other DNA
tcaatgattatcattcctatattgcrgtttttcggaggctggtacttctac

SEQ ID NO: 5068 - DNA, 51 bp, synthetic construct
  misc_feature 1..51: note = Synthetic polynucleotide
  source 1..51: mol_type = other DNA
ctgctgaagggccaccccttcttctrtgtgcctgagattgtggatgagctc

SEQ ID NO: 5069 - DNA, 51 bp, synthetic construct
  misc_feature 1..51: note = Synthetic polynucleotide
  source 1..51: mol_type = other DNA
aaacagcaaagctcacatactgaccyggcttttattaacatgatcgttggg

SEQ ID NO: 5070 - DNA, 51 bp, synthetic construct
  misc_feature 1..51: note = Synthetic polynucleotide
  source 1..51: mol_type = other DNA
aaacttccgccacatgcagatgccakagaagatgaccctatagaaagaaaa

SEQ ID NO: 5071 - DNA, 51 bp, synthetic construct
  misc_feature 1..51: note = Synthetic polynucleotide
  source 1..51: mol_type = other DNA
tacttacttgatttttttttttccartcaaacagagcagtatagctgtgac

SEQ ID NO: 5072 - DNA, 51 bp, synthetic construct
  misc_feature 1..51: note = Synthetic polynucleotide
  source 1..51: mol_type = other DNA
ttgtgctgctttatccaattctaacygtcaaacagagagcaaagaacattt

SEQ ID NO: 5073 - DNA, 51 bp, synthetic construct
  misc_feature 1..51: note = Synthetic polynucleotide
  source 1..51: mol_type = other DNA
attgttctgttgtaggtatatgccartctaacatcttgtcaagctcttgga

SEQ ID NO: 5074 - DNA, 51 bp, synthetic construct
  misc_feature 1..51: note = Synthetic polynucleotide
  source 1..51: mol_type = other DNA
cacgtggctcaccagcaacacatagrgaagaaaatgctacggcttgagggc

SEQ ID NO: 5075 - DNA, 51 bp, synthetic construct
  misc_feature 1..51: note = Synthetic polynucleotide
  source 1..51: mol_type = other DNA
aattaaagttcgaactgcccaataayaacatctcagatacctgtgaaaaca

SEQ ID NO: 5076 - DNA, 51 bp, synthetic construct
  misc_feature 1..51: note = Synthetic polynucleotide
  source 1..51: mol_type = other DNA
ccatatggctctctctcttcttccarcctctcaggatgtcctatgaggatt

SEQ ID NO: 5077 - DNA, 51 bp, synthetic construct
  misc_feature 1..51: note = Synthetic polynucleotide
  source 1..51: mol_type = other DNA
aggaatagggaggttctcatgaagabattttaaacttccatgctctgagaa

SEQ ID NO: 5078 - DNA, 51 bp, synthetic construct
  misc_feature 1..51: note = Synthetic polynucleotide
  source 1..51: mol_type = other DNA
cagagtgattaaggaaggggcagtgyagtcgacccacggatgctcctcttt

SEQ ID NO: 5079 - DNA, 51 bp, synthetic construct
  misc_feature 1..51: note = Synthetic polynucleotide
  source 1..51: mol_type = other DNA
tgtctatctctggaaaaattggtcartgagcacaagtgcctgtgtcagata

SEQ ID NO: 5080 - DNA, 51 bp, synthetic construct
  misc_feature 1..51: note = Synthetic polynucleotide
  source 1..51: mol_type = other DNA
tagtaagatgaaacaggccgtccacygtacaaaaaaagatacttccattaa

SEQ ID NO: 5081 - DNA, 51 bp, synthetic construct
  misc_feature 1..51: note = Synthetic polynucleotide
  source 1..51: mol_type = other DNA
tcagttttaaaggagaaaaccaggtraaagtgtctaatatcattagaggat

SEQ ID NO: 5082 - DNA, 51 bp, synthetic construct
  misc_feature 1..51: note = Synthetic polynucleotide
  source 1..51: mol_type = other DNA
ccagtcctggccgtacacaaagcagyacttgcagtagaggtcatcatactc

SEQ ID NO: 5083 - DNA, 51 bp, synthetic construct
  misc_feature 1..51: note = Synthetic polynucleotide
  source 1..51: mol_type = other DNA
ctgaggctggggaacatcgggcagcwtgagcggctgcgggctcttcctgcg

SEQ ID NO: 5084 - DNA, 64 bp, synthetic construct
  misc_feature 1..64: note = Synthetic
  source 1..64: mol_type = other DNA
aaaaccccggggttttaaaaccccggggttttaaaaccccggggttttaaaaccccggggtttt

SEQ ID NO: 5085 - DNA, 64 bp, synthetic construct
  misc_feature 1..64: note = Synthetic
  source 1..64: mol_type = other DNA
aaaaaaaaaaaaaaaaccccccccccccccccggggggggggggggggtttttttttttttttt

SEQ ID NO: 5086 - DNA, 64 bp, synthetic construct
  misc_feature 1..64: note = Synthetic
  source 1..64: mol_type = other DNA
acgtacgtacgtacgtacgtacgtacgtacgtacgtacgtacgtacgtacgtacgtacgtacgt

SEQ ID NO: 5087 - protein, 30 aa, synthetic construct
  VARIANT 2..30: note = may be absent
GGGGGGGGGGGGGGGGGGGGGGGGGGGGGG

SEQ ID NO: 5088 - protein, 90 aa, synthetic construct
  VARIANT 4..90: note = Up to 29 copies of GGS may be absent
GGSGGSGGSGGSGGSGGSGGSGGSGGSGGSGGSGGSGGSGGSGGSGGSGGSGGSGGSGGSGGSGGSGGSGGSGGSGGSGGSGGSGGSGGS

SEQ ID NO: 5089 - protein, 60 aa, synthetic construct
  VARIANT 3..60: note = Up to 29 copies of XP may be absent
XPXPXPXPXPXPXPXPXPXPXPXPXPXPXPXPXPXPXPXPXPXPXPXPXPXPXPXPXPXP

1. A Cas9 protein comprising an amino acid sequence that is at least 80% identical to the amino acid sequence of a Cas9 protein as provided by any one of SEQ ID NOs: 9-262,
wherein the amino acid sequence of the Cas9 protein comprises at least one mutation in an amino acid residue selected from the group consisting of amino acid residues 267, 294, 405, 480, 543, 1219, 1224, 1256, and 1362 of the amino acid sequence provided in SEQ ID NO: 9, or in a corresponding amino acid residue in any of the amino acid sequences provided in SEQ ID NOS: 10-262, and
wherein the amino acid sequence of the Cas9 protein is not identical to the amino acid sequence of a naturally occurring Cas9 protein.

2-434. (canceled)

435. The Cas9 protein of claim 1, wherein the Cas9 protein comprises an amino acid sequence that is at least 90% identical to the amino acid sequence of SEQ ID NO: 9, or a corresponding mutation in any of the amino acid sequences provided in SEQ ID NOs: 10-262.

436. The Cas9 protein of claim 1, wherein the amino acid sequence of the Cas9 protein comprises at least one mutation selected from the group consisting of S267G, K294R, F405I, E480K, E543D, E1219V, N1224K, Q1256K, and L1362P in the amino acid sequence provided in SEQ ID NO: 9, or a corresponding mutation in any of the amino acid sequences provided in SEQ ID NOs: 10-262.

437. The Cas9 protein of claim 1, wherein the amino acid sequence of the Cas9 protein comprises a K294R mutation in the amino acid sequence provided in SEQ ID NO: 9 and further comprises at least one mutation selected from the group consisting of S267G, F405I, E480K, E543D, E1219V, N1224K, Q1256K, and L1362P in the amino acid sequence provided in SEQ ID NO: 9, or a corresponding mutation in any of the amino acid sequences provided in SEQ ID NOS: 10-262.

438. The Cas9 protein of claim 1, wherein the amino acid sequence of the Cas9 protein comprises any one of the following groups of mutations:
K294R, E480K, E543D, E1219V, Q1256K, and L1362P;
K294R, E480K, E543D, E1219V, and Q1256K;
S267G, K294R, E480K, E543D, E1219V, N1224K, and Q1256K;
R115H, K141Q, S267G, K294R, Q394H, E480K, E543D, E1219V, and Q1256K;
S267G, K294R, E480K, E543D, E1219V, and Q1256K;
D257N, S267G, K294R, T466A, E480K, E543D, 11063V, E1219V, and Q1256K;
K294R, E480K, E543D, A711E, E1219V, and Q1256K;
P230S, S267G, K294R, E480K, E543D, E1219V, and Q1256K;
P230F, S267G, K294R, E480K, E543D, E1219V, and Q1256K;
K294R, E480K, E543D, A711E, E1207G, E1219V, and Q1256K; or
N175T, S267G, K294R, E480K, E543D, E1219V, and Q1256K;
in the amino acid sequence provided in SEQ ID NO: 9, or a corresponding mutation in any of the amino acid sequences provided in SEQ ID NOs: 10-262.

439. The Cas9 protein of claim 1, wherein the Cas9 protein comprises a D10A and/or a H840A mutation of the amino acid sequence provided in SEQ ID NO: 9, or a corresponding mutation in any of the amino acid sequences provided in SEQ ID NOs: 10-262.

440. The Cas9 protein of claim 1, wherein the Cas9 protein recognizes a non-canonical PAM sequence.

441. The Cas9 protein of claim 440, wherein the non-canonical PAM sequence is selected from the group consisting of AAA, AAC, AAG, AAT, CAA, CAC, CAG, CAT, GAA, GAC, GAG, GAT, TAA, TAC, TAG, TAT, ACA, ACC, ACG, ACT, CCA, CCC, CCG, CCT, GCA, GCC, GCG, GCT, TCA, TCC, TCG, TCT, AGA, AGC, AGT, CGA, CGC, CGT, GGA, GGC, GGT, TGA, TGC, TGT, ATA, ATC, ATG, ATT, CTA, CTC, CTG, CTT, GTA, GTC, GTG, GTT, TTA, TTC, TTG, and TTT.

442. A fusion protein comprising the Cas9 protein of claim 1, wherein the Cas9 protein is fused to an effector domain.

443. The fusion protein of claim 442, wherein the effector domain comprises an enzyme domain.

444. The fusion protein of claim 442, wherein the effector domain comprises a nuclease domain, a nickase domain, a recombinase domain, a deaminase domain, a methyltransferase domain, a methylase domain, an acetylase domain, an acetyltransferase domain, a transcriptional activator domain, or a transcriptional repressor domain.

445. The fusion protein of claim 442, wherein the effector domain is a nuclease domain.

446. A dimer of the fusion protein of claim 445.

447. A fusion protein comprising a first Cas9 protein fused to a second Cas9 protein, wherein the first Cas9 protein is the Cas9 protein of claim 1.

448. A complex comprising the Cas9 protein of claim 1 and a guide RNA bound to the Cas9 protein.

449. A complex comprising the fusion protein of claim 447,
a first guide RNA bound to the first Cas9 protein of the fusion protein, and
a second guide RNA bound to the second Cas9 protein of the fusion protein.

450. A method comprising contacting a DNA molecule with the Cas9 protein of claim 1 and a guide RNA, wherein the guide RNA is about 15-100 nucleotides long and comprises a sequence of at least 10 contiguous nucleotides that is complementary to a target sequence.

451. A polynucleotide encoding the Cas9 protein of claim 1.

452. A vector comprising the polynucleotide of claim 451.

453. A cell comprising the Cas9 protein of claim 1, wherein the cell is an isolated cell.
